(19) United States
(12) Patent Application Publication
(10) Pub. No.: US 2024/0034806 A1
(43) Pub. Date: Feb. 1, 2024

(54) COMPOSITIONS AND METHODS RELATED TO TUMOR ACTIVATED ANTIBODIES TARGETING TROP2 AND EFFECTOR CELL ANTIGENS

(71) Applicant: Janux Therapeutics, Inc., San Diego, CA (US)

(72) Inventors: David CAMPBELL, San Diego, CA (US); Thomas R. DIRAIMONDO, San Diego, CA (US)

(21) Appl. No.: 18/256,271

(22) PCT Filed: Dec. 7, 2021
(86) PCT No.: PCT/US2021/062261

§ 371 Date: Jun. 7, 2023

Related U.S. Application Data
(60) Provisional application No. 63/187,719, filed on May 12, 2021.
(60) Provisional application No. 63/123,327, filed on Dec. 9, 2020.

(51) Int. Cl. C07K 16/30; A61P 35/00; C07K 16/28

(52) U.S. Cl. CPC C07K 16/30; A61P 35/00; C07K 16/2809; C07K 2319/50; C07K 2317/92; C07K 2317/622; C07K 2317/94; C07K 2317/31; C07K 2317/73; C07K 2317/55

(57) ABSTRACT

Provided herein are multispecific antibodies that selectively bind to TROP2 and effector cell antigens such as CD3, pharmaceutical compositions thereof, as well as nucleic acids, and methods for making and discovering the same.

### CROSS-REFERENCE

[0001] The present application claims the benefit of U.S. Provisional Application No. 63/123,327, filed Dec. 9, 2020, U.S. Provisional Application No. 63/187,719, filed May 12, 2021, each of which is incorporated herein by reference in its entirety.

### SEQUENCE LISTING

[0002] The instant application contains a Sequence Listing which has been submitted electronically in ASCII format and is hereby incorporated by reference in its entirety. Said ASCII copy, created on Nov. 29, 2021, is named 52426-729_601_SL.txt and is 934,933 bytes in size.

### SUMMARY

[0003] Disclosed herein, in certain embodiments, are isolated polypeptides or polypeptide complexes according to Formula I:

A₂-A₁-L₁-P₁-H₁ (Formula I)

wherein: A₁ comprises a first antigen recognizing molecule that binds to an effector cell antigen; P₁ comprises a peptide that binds to A₁; L₁ comprises a linking moiety that connects A₁ to P₁ and is a substrate for a tumor specific protease; H₁ comprises a half-life extending molecule; and A₂ comprises a second antigen recognizing molecule that binds to TROP2. In some embodiments, the first antigen recognizing molecule comprises an antibody or antibody fragment. In some embodiments, first antigen recognizing molecule comprises an antibody or antibody fragment that is human or humanized. In some embodiments, L₁ is bound to N-terminus of the first antigen recognizing molecule. In some embodiments, A₂ is bound to C-terminus of the first antigen recognizing molecule. In some embodiments, L₁ is bound to C-terminus of the first antigen recognizing molecule. In some embodiments, A₂ is bound to N-terminus of the first antigen recognizing molecule. In some embodiments, the antibody or antibody fragment comprises a single chain variable fragment, a single domain antibody, or a Fab fragment. In some embodiments, A₁ is the single chain variable fragment (scFv). In some embodiments, the scFv comprises a scFv heavy chain polypeptide and a scFv light chain polypeptide. In some embodiments, A₁ is the single domain antibody. In some embodiments, the antibody or antibody fragment comprises a single chain variable fragment (scFv), a heavy chain variable domain (VH domain), a light chain variable domain (VL domain), or a variable domain (VHH) of a camelid derived single domain antibody. In some embodiments, A₁ comprises an anti-CD3e single chain variable fragment. In some embodiments, A₁ comprises an anti-CD3e single chain variable fragment that has a K_{D} binding of 1 μM or less to CD3 on CD3 expressing cells. In some embodiments, the effector cell antigen comprises CD3. In some embodiments, A₁ comprises a variable light chain and variable heavy chain each of which is capable of specifically binding to human CD3. In some embodiments, A₁ comprises complementary determining regions (CDRs) selected from the group consisting of muromonab-CD3 (OKT3), otelixizumab (TRX4), teplizumab (MGA031), visilizumab (Nuvion), SP34, X35, VIT3, BMA030 (BW264/56), CLB-T3/3, CRIS7, YTH12.5, F111-409, CLB-T3.4.2, TR-66, WT32, SPv-T3b, 11D8, XIII-141, XIII-46, XIII-87, 12F6, T3/RW2-8C8, T3/RW2-4B6, OKT3D, M-T301, SMC2, F101.01, UCHT-1, WT-31, 15865, 15865v12, 15865v16, and 15865v19. In some embodiments, the isolated polypeptide or polypeptide complex of Formula I binds to an effector cell when L₁ is cleaved by the tumor specific protease. In some embodiments, the isolated polypeptide or polypeptide complex of Formula I binds to an effector cell when L₁ is cleaved by the tumor specific protease and A₁ binds to the effector cell. In some embodiments, the effector cell is a T cell. In some embodiments, A₁ binds to a polypeptide that is part of a TCR-CD3 complex on the effector cell. In some embodiments, the polypeptide that is part of the TCR-CD3 complex is human CD3ε. In some embodiments, the effector cell antigen comprises CD3, wherein the scFv comprises complementarity determining regions (CDRs): HC-CDR1, HC-CDR2, and HC-CDR3, wherein the HC-CDR1, the HC-CDR2, and the HC-CDR3 of the scFv: HC-CDR1: SEQ ID NO: 1, HC-CDR2: SEQ ID NO: 2, and HC-CDR3: SEQ ID NO: 3; and the scFv comprises CDRs: LC-CDR1, LC-CDR2, and LC-CDR3, wherein the LC-CDR1, the LC-CDR2, and the LC-CDR3 of the scFv LC-CDR1: SEQ ID NO: 4, LC-CDR2: SEQ ID NO:5, and LC-CDR3: SEQ ID NO: 6. In some embodiments, the effector cell antigen comprises CD3, and the scFv comprises an amino acid sequence according to SEQ ID NO: 13. In some embodiments, the effector cell antigen comprises CD3, wherein the scFv comprises complementarity determining regions (CDRs): HC-CDR1, HC-CDR2, and HC-CDR3, wherein the HC-CDR1, the HC-CDR2, and the HC-CDR3 of the scFv: HC-CDR1: SEQ ID NO: 7, HC-CDR2: SEQ ID NO: 8, and HC-CDR3: SEQ ID NO: 9; and the scFv comprises CDRs: LC-CDR1, LC-CDR2, and LC-CDR3, wherein the LC-CDR1, the LC-CDR2, and the LC-CDR3 of the scFv LC-CDR1: SEQ ID NO: 10, LC-CDR2: SEQ ID NO: 11, and LC-CDR3: SEQ ID NO: 12. In some embodiments, the effector cell antigen comprises CD3, and the scFv comprises an amino acid sequence according to SEQ ID NO: 14. In some embodiments, second antigen recognizing molecule comprises an antibody or antibody fragment. In some embodiments, the antibody or antibody fragment thereof comprises a single chain variable fragment, a single domain antibody, or a Fab. In some embodiments, the antibody or antibody fragment thereof comprises a single chain variable fragment (scFv), a heavy chain variable domain (VH domain), a light chain variable domain (VL domain), a variable domain (VHH) of a camelid derived single domain antibody. In some embodiments, the antibody or antibody fragment thereof is humanized or human. In some embodiments, A₂ is the Fab. In some embodiments, the Fab comprises (a) a Fab light chain polypeptide and (b) a Fab heavy chain polypeptide. In some embodiments, the Fab comprises complementarity determining regions (CDRs): HC-CDR1, HC-CDR2, and HC-CDR3, wherein the HC-CDR1, the HC-CDR2, and the HC-CDR3 of the Fab comprise: HC-CDR1: SEQ ID NO: 15, HC-CDR2: SEQ ID NO: 16, and HC-CDR3: SEQ ID NO: 17; and the Fab comprises CDRs: LC-CDR1, LC-CDR2, and LC-CDR3, wherein the LC-CDR1, the LC-CDR2, and the LC-CDR3 of the Fab comprise LC-CDR1: SEQ ID NO: 18, LC-CDR2: SEQ ID NO: 19, and LC-CDR3: SEQ ID NO: 20. In some embodiments, the Fab light chain polypeptide comprises an amino acid sequence according to SEQ ID NO: 21. In some embodiments, Fab heavy chain polypeptide comprises an amino acid sequence according to SEQ ID NO: 22. In some embodiments, the Fab light chain polypeptide of A₂ is bound to a C-terminus of the single chain variable fragment (scFv) of A₁. In some embodiments, the Fab heavy chain polypeptide of A₂ is bound to a C-terminus of the single chain variable fragment (scFv) A₁. In some embodiments, the Fab light chain polypeptide of A₂ is bound to a N-terminus of the single chain variable fragment (scFv) of A₁. In some embodiments, the Fab heavy chain polypeptide of A₂ is bound to a N-terminus of the single chain variable fragment (scFv) A₁. In some embodiments, the Fab heavy chain polypeptide of A₂ is bound to the scFv heavy chain polypeptide of A₁. In some embodiments, the Fab light chain polypeptide of A₂ is bound to the scFv heavy chain polypeptide of A₁. In some embodiments, the Fab heavy chain polypeptide of A₂ is bound to the scFv light chain polypeptide of A₁. In some embodiments, the Fab light chain polypeptide of A₂ is bound to the scFv light chain polypeptide of A₁. In some embodiments, A₂ further comprises P₂ and L₂, wherein P₂ comprises a peptide that binds to A₂; and L₂ comprises a linking moiety that connects A₂ to P₂ and is a substrate for a tumor specific protease. In some embodiments, the isolated polypeptide or polypeptide complex is according to Formula Ia P₂-L₂-A₂-A₁-L₁-P₁-H₁ (Formula Ia) In some embodiments, the Fab heavy chain polypeptide of A₂ is bound to the scFv heavy chain polypeptide of A₁ and L₂ is bound to the Fab light chain polypeptide of A₂. In some embodiments, the Fab light chain polypeptide of A₂ is bound to the scFv heavy chain polypeptide of A₁ and L₂ is bound to the Fab heavy chain polypeptide of A₂. In some embodiments, the Fab heavy chain polypeptide of A₂ is bound to the scFv light chain polypeptide of A₁ and L₂ is bound to the Fab light chain polypeptide of A₂. In some embodiments, the Fab light chain polypeptide of A₂ is bound to the scFv light chain polypeptide of A₁ and L₂ is bound to the Fab heavy chain polypeptide of A₂. In some embodiments, P₁ impairs binding of A₁ to the effector cell antigen. In some embodiments, P₁ is bound to A₁ through ionic interactions, electrostatic interactions, hydrophobic interactions, Pi-stacking interactions, and H-bonding interactions, or a combination thereof. In some embodiments, P₁ has less than 70% sequence homology to the effector cell antigen. In some embodiments, P₂ impairs binding of A₂ to TROP2. In some embodiments, P₂ is bound to A₂ through ionic interactions, electrostatic interactions, hydrophobic interactions, Pi-stacking interactions, and H-bonding interactions, or a combination thereof. In some embodiments, P₂ is bound to A₂ at or near an antigen binding site. In some embodiments, P₂ has less than 70% sequence homology to TROP2. In some embodiments, P₁ or P₂ comprises a peptide sequence of at least 10 amino acids in length. In some embodiments, P₁ or P₂ comprises a peptide sequence of at least 10 amino acids in length and no more than 20 amino acids in length. In some embodiments, P₁ or P₂ comprises a peptide sequence of at least 16 amino acids in length. In some embodiments, P₁ or P₂ comprises a peptide sequence of no more than 40 amino acids in length. In some embodiments, P₁ or P₂ comprises at least two cysteine amino acid residues. In some embodiments, P₁ or P₂ comprises a cyclic peptide or a linear peptide. In some embodiments, P₁ or P₂ comprises a cyclic peptide. In some embodiments, P₁ or P₂ comprises a linear peptide. In some embodiments, P₁ comprises at least two cysteine amino acid residues. In some embodiments, P₁ comprises an amino acid sequence according to SEQ ID NO: 26, 27, or 122. In some embodiments, P₂ comprises an amino acid sequence according to any one of SEQ ID NOs: 23-25. In some embodiments, L₁ is bound to N-terminus of A₁. In some embodiments, L₁ is bound to C-terminus of A₁. In some embodiments, L₂ is bound to N-terminus of A₂. In some embodiments, L₂ is bound to C-terminus of A₂. In some embodiments, L₁ or L₂ is a peptide sequence having at least 5 to no more than 50 amino acids. In some embodiments, L₁ or L₂ is a peptide sequence having at least 10 to no more than 30 amino acids. In some embodiments, L₁ or L₂ is a peptide sequence having at least 10 amino acids. In some embodiments, L₁ or L₂ is a peptide sequence having at least 18 amino acids. In some embodiments, L₁ or L₂ is a peptide sequence having at least 26 amino acids. In some embodiments, L₁ or L₂ has a formula comprising (G₂S)ₙ (SEQ ID NO: 243), wherein n is an integer from 1 to 3. In some embodiments, L₁ has a formula selected from the group consisting of (G₂S)ₙ, (GS)ₙ, (GSGGS)ₙ (SEQ ID NO: 62), (GGGS)ₙ (SEQ ID NO: 63), (GGGGS)ₙ (SEQ ID NO: 64), and (GSSGGS)ₙ (SEQ ID NO: 65), wherein n is an integer of at least 1. In some embodiments, P₁ becomes unbound from A₁ when L₁ is cleaved by the tumor specific protease thereby exposing A₁ to the effector cell antigen. In some embodiments, P₂ becomes unbound from A₂ when L₂ is cleaved by the tumor specific protease thereby exposing A₂ to TROP2. In some embodiments, the tumor specific protease is selected from the group consisting of a matrix metalloprotease (MMP), serine protease, cysteine protease, threonine protease, and aspartic protease. In some embodiments, the matrix metalloprotease comprises MMP2, MMP7, MMP9, MMP13, or MMP14. In some embodiments, the serine protease comprises matriptase (MTSP1), urokinase, or hepsin. In some embodiments, L₁ or L₂ comprises a urokinase cleavable amino acid sequence, a matriptase cleavable amino acid sequence, matrix metalloprotease cleavable amino acid sequence, or a legumain cleavable amino acid sequence. In some embodiments, L₁ or L₂ comprises an amino acid sequence according to SEQ ID NO: 31 or 32. In some embodiments, L₁ or L₂ comprises an amino acid sequence according to SEQ ID NO: 58 or 59. In some embodiments, L₁ or L₂ comprises an amino acid sequence according to any one of SEQ ID NOs: 28-61. In some embodiments, L₁ or L₂ comprises an amino acid sequence of Linker 25 (ISSGLLSGRSDAG) (SEQ ID NO: 54), Linker 26 (AAGLLAPPGGLSGRSDAG) (SEQ ID NO: 55), Linker 27 (SPLGLSGRSDAG) (SEQ ID NO: 56), or Linker 28 (LSGRSDAGSPLGLAG) (SEQ ID NO: 57), or an amino acid sequence that has 1, 2, or 3 amino acid substitutions, additions, or deletions relative to the amino acid sequence of Linker 25, Linker 26, Linker 27, or Linker 28. In some embodiments, H₁ comprises a polymer. In some embodiments, the polymer is polyethylene glycol (PEG). In some embodiments, H₁ comprises albumin. In some embodiments, H₁ comprises an Fc domain. In some embodiments, the albumin is serum albumin. In some embodiments, the albumin is human serum albumin. In some embodiments, H₁ comprises a polypeptide, a ligand, or a small molecule. In some embodiments, the polypeptide, the ligand or the small molecule binds serum protein or a fragment thereof, a circulating immunoglobulin or a fragment thereof, or CD35/CR1. In some embodiments, the serum protein comprises a thyroxine-binding protein, a transthyretin, a 1-acid glycoprotein, a transferrin, transferrin receptor or a transferrin-binding portion thereof, a fibrinogen, or an albumin. In some embodiments, the circulating immunoglobulin molecule comprises IgG1, IgG2, IgG3, IgG4, slgA, IgM or IgD. In some embodiments, the serum protein is albumin. In some embodiments, the polypeptide is an antibody. In some embodiments, the antibody comprises a single domain antibody, a single chain variable fragment, or a Fab. In some embodiments, the single domain antibody comprises a single domain antibody that binds to albumin. In some embodiments, the single domain antibody is a human or humanized antibody. In some embodiments, the single domain antibody is 645gH1gL1. In some embodiments, the single domain antibody is 645dsgH5gL4. In some embodiments, the single domain antibody is 23-13-A01-sc02. In some embodiments, the single domain antibody is A10m3 or a fragment thereof. In some embodiments, the single domain antibody is DOM7r-31. In some embodiments, the single domain antibody is DOM7h-11-15. In some embodiments, the single domain antibody is Alb-1, Alb-8, or Alb-23. In some embodiments, the single domain antibody is 10E. In some embodiments, the single domain antibody comprises complementarity determining regions (CDRs): HC-CDR1, HC-CDR2, and HC-CDR3, wherein the HC-CDR1, the HC-CDR2, and the HC-CDR3 of the single domain antibody comprise: HC-CDR1: SEQ ID NO: 66, HC-CDR2: SEQ ID NO: 67, and HC-CDR3: SEQ ID NO: 68. In some embodiments, the single domain antibody comprises an amino acid sequence according to SEQ ID NO: 69. In some embodiments, the single domain antibody comprises complementarity determining regions (CDRs): HC-CDR1, HC-CDR2, and HC-CDR3, wherein the HC-CDR1, the HC-CDR2, and the HC-CDR3 of the single domain antibody comprise: HC-CDR1: SEQ ID NO: 70, HC-CDR2: SEQ ID NO: 71, and HC-CDR3: SEQ ID NO: 72. In some embodiments, the single domain antibody comprises an amino acid sequence according to SEQ ID NO: 73. In some embodiments, the single domain antibody is SA21. In some embodiments, the isolated polypeptide or polypeptide complex comprises a modified amino acid, a non-natural amino acid, a modified non-natural amino acid, or a combination thereof. In some embodiments, the modified amino acid or modified non-natural amino acid comprises a post-translational modification. In some embodiments, H₁ comprises a linking moiety (L₃) that connects H₁ to P₁. In some embodiments, L₃ is a peptide sequence having at least 5 to no more than 50 amino acids. In some embodiments, L₃ is a peptide sequence having at least 10 to no more than 30 amino acids. In some embodiments, L₃ is a peptide sequence having at least 10 amino acids. In some embodiments, L₃ is a peptide sequence having at least 18 amino acids. In some embodiments, L₃ is a peptide sequence having at least 26 amino acids. In some embodiments, L₃ has a formula selected from the group consisting of (G₂S)ₙ, (GS)ₙ, (GSGGS)ₙ (SEQ ID NO: 62), (GGGS)ₙ (SEQ ID NO: 63), (GGGGS)ₙ (SEQ ID NO: 64), and (GSSGGS)ₙ (SEQ ID NO: 65), wherein n is an integer of at least 1. In some embodiments, L₃ comprises an amino acid sequence according to SEQ ID NO: 30. In some embodiments, the isolated polypeptide or polypeptide complex comprises an amino acid sequence with at least 95% sequence identity to SEQ ID NOs: 74-121. In some embodiments, the isolated polypeptide or polypeptide complex comprises an amino acid sequence with at least 95% sequence identity to SEQ ID NO: 82. In some embodiments, the isolated polypeptide or polypeptide complex comprises an amino acid sequence with at least 95% sequence identity to SEQ ID NO: 83. In some embodiments, the isolated polypeptide or polypeptide complex comprises an amino acid sequence with at least 95% sequence identity to SEQ ID NO: 74 and SEQ ID NO: 75. In some embodiments, the isolated polypeptide or polypeptide complex comprises an amino acid sequence with at least 95% sequence identity to SEQ ID NO: 76 and SEQ ID NO: 77. In some embodiments, the isolated polypeptide or polypeptide complex comprises an amino acid sequence with at least 95% sequence identity to SEQ ID NO: 78 and SEQ ID NO: 79. In some embodiments, the isolated polypeptide or polypeptide complex comprises an amino acid sequence with at least 95% sequence identity to SEQ ID NO: 80 and SEQ ID NO: 81. In some embodiments, the isolated polypeptide or polypeptide complex comprises an amino acid sequence with at least 95% sequence identity to SEQ ID NO: 82 and SEQ ID NO: 83. In some embodiments, the isolated polypeptide or polypeptide complex comprises an amino acid sequence with at least 95% sequence identity to SEQ ID NO: 84 and SEQ ID NO: 85. In some embodiments, the isolated polypeptide or polypeptide complex comprises an amino acid sequence with at least 95% sequence identity to SEQ ID NO: 86 and SEQ ID NO: 87. In some embodiments, the isolated polypeptide or polypeptide complex comprises an amino acid sequence with at least 95% sequence identity to SEQ ID NO: 88 and SEQ ID NO: 89. In some embodiments, the isolated polypeptide or polypeptide complex comprises an amino acid sequence with at least 95% sequence identity to SEQ ID NO: 90 and SEQ ID NO: 91. In some embodiments, the isolated polypeptide or polypeptide complex comprises an amino acid sequence with at least 95% sequence identity to SEQ ID NO: 92 and SEQ ID NO: 93. In some embodiments, the isolated polypeptide or polypeptide complex comprises an amino acid sequence with at least 95% sequence identity to SEQ ID NO: 94 and SEQ ID NO: 95. In some embodiments, the isolated polypeptide or polypeptide complex comprises an amino acid sequence with at least 95% sequence identity to SEQ ID NO: 96 and SEQ ID NO: 97. In some embodiments, the isolated polypeptide or polypeptide complex comprises an amino acid sequence with at least 95% sequence identity to SEQ ID NO: 98 and SEQ ID NO: 99. In some embodiments, the isolated polypeptide or polypeptide complex comprises an amino acid sequence with at least 95% sequence identity to SEQ ID NO: 100 and SEQ ID NO: 101. In some embodiments, the isolated polypeptide or polypeptide complex comprises an amino acid sequence with at least 95% sequence identity to SEQ ID NO: 102 and SEQ ID NO: 103. In some embodiments, the isolated polypeptide or polypeptide complex comprises an amino acid sequence with at least 95% sequence identity to SEQ ID NO: 104 and SEQ ID NO: 105. In some embodiments, the isolated polypeptide or polypeptide complex comprises an amino acid sequence with at least 95% sequence identity to SEQ ID NO: 106 and SEQ ID NO: 107. In some embodiments, the isolated polypeptide or polypeptide complex comprises an amino acid sequence with at least 95% sequence identity to SEQ ID NO: 108 and SEQ ID NO: 109. In some embodiments, the isolated polypeptide or polypeptide complex comprises an amino acid sequence with at least 95% sequence identity to SEQ ID NO: 110 and SEQ ID NO: 111. In some embodiments, the isolated polypeptide or polypeptide complex comprises an amino acid sequence with at least 95% sequence identity to SEQ ID NO: 112 and SEQ ID NO: 113. In some embodiments, the isolated polypeptide or polypeptide complex comprises an amino acid sequence with at least 95% sequence identity to SEQ ID NO: 114 and SEQ ID NO: 115. In some embodiments, the isolated polypeptide or polypeptide complex comprises an amino acid sequence with at least 95% sequence identity to SEQ ID NO: 116 and SEQ ID NO: 117. In some embodiments, the isolated polypeptide or polypeptide complex comprises an amino acid sequence with at least 95% sequence identity to SEQ ID NO: 118 and SEQ ID NO: 119. In some embodiments, the isolated polypeptide or polypeptide complex comprises an amino acid sequence with at least 95% sequence identity to SEQ ID NO: 120 and SEQ ID NO: 121.

[0004] Disclosed herein, in certain embodiments, are pharmaceutical compositions comprising: (a) the isolated polypeptide or polypeptide complex described herein; and (b) a pharmaceutically acceptable excipient.

[0005] Disclosed herein, in certain embodiments, are isolated recombinant nucleic acid molecules encoding the isolated polypeptide or polypeptide complex described herein.

[0006] Disclosed herein, in certain embodiments, are isolated polypeptides or polypeptide complexes according to Formula II:

L₁ₐ-P₁ₐ-H₁ₐ (Formula II)

wherein: L₁ₐ comprises a tumor specific protease-cleaved linking moiety that when uncleaved connects P₁ₐ to a first antigen recognizing molecule that binds to an effector cell antigen and the first antigen recognizing molecule is connected to a second antigen recognizing molecule that binds to TROP2; P₁ₐ comprises a peptide that binds to the first antigen recognizing molecule when L₁ₐ is uncleaved; and H₁ₐ comprises a half-life extending molecule. In some embodiments, P₁ₐ when L₁ₐ is uncleaved impairs binding of the first antigen recognizing molecule to the effector cell antigen. In some embodiments, the first antigen recognizing molecule comprises an antibody or antibody fragment. In some embodiments, the effector cell antigen is an anti-CD3 effector cell antigen. In some embodiments, P₁ₐ has less than 70% sequence homology to the effector cell antigen. In some embodiments, P₁ₐ comprises a peptide sequence of at least 10 amino acids in length. In some embodiments, P₁ₐ comprises a peptide sequence of at least 10 amino acids in length and no more than 20 amino acids in length. In some embodiments, P₁ₐ comprises a peptide sequence of at least 16 amino acids in length. In some embodiments, P₁ₐ comprises a peptide sequence of no more than 40 amino acids in length. In some embodiments, P₁ₐ comprises at least two cysteine amino acid residues. In some embodiments, P₁ₐ comprises a cyclic peptide or a linear peptide. In some embodiments, P₁ₐ comprises a cyclic peptide. In some embodiments, P₁ₐ comprises a linear peptide. In some embodiments, P₁ₐ comprises an amino acid sequence selected from the group consisting of SEQ ID NO: 26, 27, or 122. In some embodiments, H₁ₐ comprises a polymer. In some embodiments, the polymer is polyethylene glycol (PEG). In some embodiments, H₁ₐ comprises albumin. In some embodiments, H₁ₐ comprises an Fc domain. In some embodiments, the albumin is serum albumin. In some embodiments, the albumin is human serum albumin. In some embodiments, H₁ₐ comprises a polypeptide, a ligand, or a small molecule. In some embodiments, the polypeptide, the ligand or the small molecule binds a serum protein or a fragment thereof, a circulating immunoglobulin or a fragment thereof, or CD35/CR1. In some embodiments, the serum protein comprises a thyroxine-binding protein, a transthyretin, a 1-acid glycoprotein, a transferrin, transferrin receptor or a transferrin-binding portion thereof, a fibrinogen, or an albumin. In some embodiments, the circulating immunoglobulin molecule comprises IgG1, IgG2, IgG3, IgG4, slgA, IgM or IgD. In some embodiments, the serum protein is albumin. In some embodiments, the polypeptide is an antibody. In some embodiments, the antibody comprises a single domain antibody, a single chain variable fragment or a Fab. In some embodiments, the antibody comprises a single domain antibody that binds to albumin. In some embodiments, the antibody is a human or humanized antibody. In some embodiments, the single domain antibody is 645gH1gL1. In some embodiments, the single domain antibody is 645dsgH5gL4. In some embodiments, the single domain antibody is 23-13-A01-sc02. In some embodiments, the single domain antibody is A10m3 or a fragment thereof. In some embodiments, the single domain antibody is DOM7r-31. In some embodiments, the single domain antibody is DOM7h-11-15. In some embodiments, the single domain antibody is Alb-1, Alb-8, or Alb-23. In some embodiments, the single domain antibody is 10E. In some embodiments, the single domain antibody comprises complementarity determining regions (CDRs): HC-CDR1, HC-CDR2, and HC-CDR3, wherein the HC-CDR1, the HC-CDR2, and the HC-CDR3 of the single domain antibody comprise: HC-CDR1: SEQ ID NO: 66, HC-CDR2: SEQ ID NO: 67, and HC-CDR3: SEQ ID NO: 68. In some embodiments, the single domain antibody comprises an amino acid sequence according to SEQ ID NO: 69. In some embodiments, the single domain antibody comprises complementarity determining regions (CDRs): HC-CDR1, HC-CDR2, and HC-CDR3, wherein the HC-CDR1, the HC-CDR2, and the HC-CDR3 of the single domain antibody comprise: HC-CDR1: SEQ ID NO: 70, HC-CDR2: SEQ ID NO: 71, and HC-CDR3: SEQ ID NO: 72. In some embodiments, the single domain antibody comprises an amino acid sequence according to SEQ ID NO: 73. In some embodiments, the single domain antibody is SA21. In some embodiments, H₁ₐ comprises a linking moiety (L₁ₐ) that connects H₁ₐ to Pia. In some embodiments, L₁ₐ is a peptide sequence having at least 5 to no more than 50 amino acids. In some embodiments, L₁ₐ is a peptide sequence having at least 10 to no more than 30 amino acids. In some embodiments, L₁ₐ is a peptide sequence having at least 10 amino acids. In some embodiments, L₁ₐ is a peptide sequence having at least 18 amino acids. In some embodiments, L₁ₐ is a peptide sequence having at least 26 amino acids. In some embodiments, L₁ₐ has a formula selected from the group consisting of (G₂S)ₙ, (GS)ₙ, (GSGGS)ₙ (SEQ ID NO: 62), (GGGS)ₙ (SEQ ID NO: 63), (GGGGS)ₙ (SEQ ID NO: 64), and (GSSGGS)ₙ (SEQ ID NO: 65), wherein n is an integer of at least 1. In some embodiments, L₁ₐ comprises an amino acid sequence according to any one of SEQ ID NOs: 28-61. Disclosed herein, in some embodiments, are polypeptide complexes comprising a structural arrangement according to Configuration 1:
wherein the polypeptide complex comprises a single chain variable fragment (scFv) comprising a light chain variable domain and a heavy chain variable domain, wherein the scFv further comprises a peptide that impairs binding of the scFv to an effector cell antigen and the peptide is linked to a N-terminus of the heavy chain variable domain of the scFv with a linking moiety that is a substrate for a tumor specific protease, and the peptide further comprises a half-life extending molecule; and a Fab that binds to TROP2, wherein the Fab comprises a Fab light chain polypeptide and a Fab heavy chain polypeptide, wherein the Fab heavy chain polypeptide is linked to a C terminus of the light chain variable domain of the scFv, and wherein the Fab further comprises P₂ and L₂, wherein P₂ comprises a peptide that impairs binding to TROP2; and L₂ comprises a linking moiety that connects the Fab light chain polypeptide to P₂ and is a substrate for a tumor specific protease. Disclosed herein, in some embodiments, are polypeptide complexes comprising a structural arrangement according to Configuration 2:
wherein the polypeptide complex comprises a single chain variable fragment (scFv) comprising a light chain variable domain and a heavy chain variable domain, wherein the scFv further comprises a peptide that impairs binding of the scFv to an effector cell antigen and the peptide is linked to a N-terminus of the heavy chain variable domain of the scFv with a linking moiety that is a substrate for a tumor specific protease, and the peptide further comprises a half-life extending molecule; and a Fab that binds to TROP2, wherein the Fab comprises a Fab light chain polypeptide and a Fab heavy chain polypeptide, wherein the Fab light chain polypeptide is linked to a C terminus of the light chain variable domain of the scFv, and wherein the Fab further comprises P₂ and L₂, wherein P₂ comprises a peptide that impairs binding to TROP2; and L₂ comprises a linking moiety that connects the Fab heavy chain polypeptide to P₂ and is a substrate for a tumor specific protease.

### INCORPORATION BY REFERENCE

[0007] All publications, patents, and patent applications mentioned in this specification are herein incorporated by reference to the same extent as if each individual publication, patent, or patent application was specifically and individually indicated to be incorporated by reference.

### BRIEF DESCRIPTION OF THE DRAWINGS

[0008] The novel features of the disclosure are set forth with particularity in the appended claims. A better understanding of the features and advantages of the present disclosure will be obtained by reference to the following detailed description that sets forth illustrative embodiments, in which the principles of the disclosure are utilized, and the accompanying drawings of which:

[0009] FIGS. 1A-1B illustrates polypeptide complexes of this disclosure in a normal orientation (FIG. 1A) and flipped orientation (FIG. 1B).

[0010] FIG. 2A illustrates titration data for TROP2 binding for several polypeptide complexes of this disclosure.

[0011] FIG. 2B illustrates titration data for TROP2 binding for several polypeptide complexes of this disclosure.

[0012] FIG. 3A illustrates titration data for CD3ε binding for several polypeptide complexes of this disclosure.

[0013] FIG. 3B illustrates titration data for CD3ε binding for several polypeptide complexes of this disclosure.

[0014] FIG. 4A illustrates cell viability data for HCT116 cells treated with polypeptide complexes of this disclosure.

[0015] FIG. 4B illustrates cell viability data for HCT116 cells treated with polypeptide complexes of this disclosure.

[0016] FIG. 4C illustrates cell viability data for MDAMB231 cells treated with polypeptide complexes of this disclosure.

[0017] FIG. 4D illustrates cell viability data for MDAMB231 cells treated with polypeptide complexes of this disclosure.

[0018] FIG. 5A illustrates titration data for TROP2 binding for several polypeptide complexes of this disclosure.

[0019] FIG. 5B illustrates titration data for TROP2 binding for several polypeptide complexes of this disclosure.

[0020] FIG. 6A illustrates titration data for CD3ε binding for several polypeptide complexes of this disclosure.

[0021] FIG. 6B illustrates titration data for CD3ε binding for several polypeptide complexes of this disclosure.

[0022] FIG. 7A illustrates cell viability data for HCT116 cells treated with polypeptide complexes of this disclosure.

[0023] FIG. 7B illustrates cell viability data for HCT116 cells treated with polypeptide complexes of this disclosure.

[0024] FIGS. 8A-8C illustrate polypeptide complex mediated H292 tumor cell killing in the presence of CD8+ T cells.

[0025] FIGS. 9A-9D illustrate polypeptide complex mediated HCT116 tumor cell killing in the presence of CD8+ T cells.

[0026] FIGS. 10A-10C illustrate polypeptide complex mediated MDAMB231 tumor cell killing in the presence of CD8+ T cells.

[0027] FIG. 11A illustrates polypeptide complex PC1 pharmacokinetics in cynomolgus monkeys after a single IV bolus injection.

[0028] FIG. 11B illustrates polypeptide complex PC5 pharmacokinetics in cynomolgus monkeys after a single IV bolus injection.

[0029] FIG. 11C illustrates polypeptide complex PC18 pharmacokinetics in cynomolgus monkeys after a single IV bolus injection.

[0030] FIG. 11D illustrates polypeptide complex PC21 pharmacokinetics in cynomolgus monkeys after a single IV bolus injection.

[0031] FIG. 12A illustrates cytokine release in cynomolgus monkeys after single IV bolus of PC1.

[0032] FIG. 12B illustrates cytokine release in cynomolgus monkeys after single IV bolus of polypeptide complex PC5.

[0033] FIG. 12C illustrates cytokine release in cynomolgus monkeys after single IV bolus of polypeptide complex PC18.

[0034] FIG. 12D illustrates cytokine release in cynomolgus monkeys after single IV bolus of polypeptide complex PC21.

[0035] FIG. 12E illustrates plasma cytokine level after administration of polypeptide complexes (unmasked TROP2-TCE and masked TROP2-TRACTr) described herein.

[0036] FIG. 13A illustrates serum liver enzymes in cynomolgus monkeys after single IV bolus of PC1.

[0037] FIG. 13B illustrates serum liver enzymes in cynomolgus monkeys after single IV bolus of polypeptide complex PC5.

[0038] FIG. 13C illustrates serum liver enzymes in cynomolgus monkeys after single IV bolus of polypeptide complex PC18.

[0039] FIG. 13D illustrates serum liver enzymes in cynomolgus monkeys after single IV bolus of polypeptide complex PC21.

[0040] FIG. 14A and FIG. 14B illustrate TROP2 Fab inhibition by alanine scanning peptides of TROP2 Fab Peptide-1 as measured by ELISA.

[0041] FIG. 15A and FIG. 15B illustrate TROP2 Fab binding by alanine scanning peptides of TROP2 Fab Peptide-2 as measured by ELISA.

[0042] FIG. 16A and FIG. 16B illustrate TROP2 Fab inhibition by alanine scanning peptides of TROP2 Fab Peptide-2 as measured by ELISA.

[0043] FIG. 17A-FIG. 17C illustrate optimized TROP2 Fab Peptide-1 sequences evaluated for peptide inhibition of TROP2 Fab.

[0044] FIG. 18 illustrates the core sequence motif of optimized TROP2 Fab Peptide-1 sequences generated using WebLogo 3.7.4.

[0045] FIG. 19A-FIG. 19C illustrate optimized TROP2 Fab Peptide-2 sequences evaluated for peptide binding to TROP2 Fab.

[0046] FIG. 20A-FIG. 20C illustrate optimized TROP2 Fab Peptide-2 sequences evaluated for peptide inhibition of TROP2 Fab.

[0047] FIG. 21 illustrates the core sequence motif of optimized TROP2 Fab Peptide-2 sequences generated using WebLogo 3.7.4.

[0048] FIG. 22 illustrates titration data for TROP2 binding for several polypeptide complexes of this disclosure.

[0049] FIG. 23 illustrates titration data for CD3ε binding for several polypeptide complexes of this disclosure.

[0050] FIG. 24A illustrates PC25 mediated HCT116 tumor cell killing in the presence of CD8+ T cells.

[0051] FIG. 24B illustrates PC26 mediated HCT116 tumor cell killing in the presence of CD8+ T cells.

[0052] FIG. 24C illustrates PC25 mediated MDAMB231 tumor cell killing in the presence of CD8+ T cells.

[0053] FIG. 25 illustrates PC22 pharmacokinetics in cynomolgus monkeys after a single IV bolus injection.

[0054] FIGS. 26A-26F illustrate cytokine release in cynomolgus monkeys after single IV bolus of PC22.

[0055] FIGS. 27A-27B illustrate serum liver enzyme levels in cynomolgus monkeys after single IV bolus of PC22.

[0056] FIGS. 28A-28D illustrate in vivo tumor growth inhibition in human PBMC engrafted NCG mice bearing MDAMB231 xenograft tumors. The anti-tumor activity observed was protease dependent in that the polypeptide complex lacking the protease substrate within the cleavable linker was equivalent to vehicle controls. Shown are PC3 (FIG. 28A), PC17 (FIG. 28B), PC23 (FIG. 28C), PC24 (FIG. 28D).

[0057] FIGS. 29A-29F illustrate anti-CD3 scFv binding by alanine scanning peptides of anti-CD3 scFv Peptide-A and Peptide-B as measured by ELISA.

[0058] FIGS. 30A-30F illustrate inhibition of anti-CD3 scFv binding to CD3 by alanine scanning peptides of anti-CD3 scFv Peptide-A and Peptide-B as measured by ELISA.

[0059] FIGS. 31A-31B illustrate anti-CD3 scFv binding by optimized anti-CD3 scFv Peptide-B sequences as measured by ELISA.

[0060] FIGS. 32A-32B illustrate inhibition of anti-CD3 scFv binding to CD3 by optimized anti-CD3 scFv Peptide-B sequences as measured by ELISA.

[0061] FIG. 33 illustrates the core sequence motif of optimized anti-CD3 scFv Peptide-B sequences generated using WebLogo 3.7.4.

### DETAILED DESCRIPTION

[0062] Multispecific antibodies combine the benefits of different binding specificities derived from two or more antibodies into a single composition. Multispecific antibodies for redirecting T cells to cancers have shown promise in both pre-clinical and clinical studies. This approach relies on binding of one antigen interacting portion of the antibody to a tumor-associated antigen or marker, while a second antigen interacting portion can bind to an effector cell antigen on a T cell, such as CD3, which then triggers cytotoxic activity.

[0063] One such tumor-associated antigen is TROP2. TROP2 (also known as tumor-associated calcium signal transducer 2 or epithelial glycoprotein-1) is the protein product of the TACSTD2 gene, and is a transmembrane glycoprotein that functions in variety of cell signaling pathways, many of which are associated with tumorigenesis. TROP2 has been shown to be overexpressed in multiple human carcinomas, including lung, breast, cervical, ovarian, colorectal, pancreatic, and gastric cancers, and its expression has been correlated with poor patient prognosis. Furthermore, TROP2 functions as an oncogene capable of driving both tumorigenesis and metastasis in epithelial cancers such as colorectal cancer. TROP2 expression in cancer cells has long been correlated with drug resistance, and high levels of TROP2 expression have been shown to correlate with poor prognosis in a variety of cancer types. In a meta-analysis, including data from approximately 2,500 patients, increased TROP2 expression was associated with poor overall survival and disease-free survival outcomes across several solid tumors.

[0064] T cell engagers (TCEs) therapeutics have several benefits including they are not cell therapies and thus can be offered as off-the-shelf therapies as opposed to chimeric antigen receptor T cell (CAR T cell) therapies. While TCE therapeutics have displayed potent anti-tumor activity in hematological cancers, developing TCEs to treat solid tumors has faced challenges due to the limitations of prior TCE technologies, namely (i) overactivation of the immune system leading to cytokine release syndrome (CRS), (ii) on-target, healthy tissue toxicities and (iii) poor pharmacokinetics (PK) leading to short half-life. CRS arises from the systemic activation of T cells and can result in life-threatening elevations in inflammatory cytokines such as interleukin-6 (IL-6). Severe and acute CRS leading to dose limited toxicities and deaths have been observed upon the dosing of T cell engagers develop using other platforms to treat cancer patients in poor clinical studies. This toxicity restricts the maximum blood levels of T cell engagers that can be safely dosed. T cell engager effectiveness has also been limited because of on-target, healthy tissue toxicity. T cell engagers developed using a platform not designed for tumor-specification activation have resulted in clinicals holds and dose-limiting toxicities resulting from target expression in healthy tissues. T cell engagers have also been limited by short half-lives. T cell engagers quickly reach sub-therapeutic levels after being administered as they are quickly eliminated from the body due to their short exposure half-lives. For this reason, T cell engagers such as blinatumomab are typically administered by a low-dose, continuous infusion pump over a period of weeks to overcome the challenge of a short half-life and to maintain therapeutic levels of drug in the body. A continuous dosing regimen represents a significant burden for patients.

[0065] To overcome these challenges associated with the effectiveness of T cell engagers, described herein, are isolated polypeptide or polypeptide complexes that comprise binding domains that selectively bind to an effector cell antigen and TROP2, in which one or more of the binding domains is selectively activated in the tumor microenvironment and the isolated polypeptide or polypeptide complex comprises a half-life extending molecule. Such modifications reduce CRS and on-target healthy tissue toxicity risk, improves stability in the bloodstream and serum half-life prior to activation. The isolated polypeptide or polypeptide complexes described herein have activity at low levels of target expression, and are easily manufactured.

[0066] In some embodiments, the isolated polypeptides or polypeptide complexes described herein are used in a method of treating cancer. In some embodiments, the cancer has cells that express TROP2. In some instances, the cancer is a solid tumor cancer. In some embodiments, the cancer is lung, breast (e.g. HER2+; ER/PR+; TNBC), cervical, ovarian, colorectal, pancreatic or gastric. In some embodiments, the polypeptides or polypeptide complexes described herein are used in a method of treating triple-negative breast cancer (TNBC), urothelial cancer (UC), non-small cell lung cancer (NSCLC), small cell lung cancer (SCLC), gastric cancer, esophageal cancer, head and neck cancer, prostate cancer, or endometrial cancer. In some embodiments, the polypeptides or polypeptide complexes described herein are used in a method of treating breast cancer, lung cancer, urothelial cancer, endometrial cancer, ovarian cancer, prostate cancer, pancreatic cancer, gastric cancer, colon cancer, head and neck cancer, and glioma. In some embodiments, are methods of treating cancer comprising administering to a subject in need thereof an isolated polypeptide or polypeptide complex according to Formula I:

A₂-A₁-L₁-P₁-H₁ (Formula I)

wherein: A₁ comprises a first antigen recognizing molecule that binds to an effector cell antigen; P₁ comprises a peptide that binds to A₁; L₁ comprises a linking moiety that connects A₁ to P₁ and is a substrate for a tumor specific protease; H₁ comprises a half-life extending molecule; and A₂ comprises a second antigen recognizing molecule that binds to TROP2.

[0067] Disclosed herein, in some embodiments, are isolated polypeptides or polypeptide complexes according to Formula I:

A₂-A₁-L₁-P₁-H₁ (Formula I)

wherein: A₁ comprises a first antigen recognizing molecule that binds to an effector cell antigen; P₁ comprises a peptide that binds to A₁; L₁ comprises a linking moiety that connects A₁ to P₁ and is a substrate for a tumor specific protease; H₁ comprises a half-life extending molecule; and A₂ comprises a second antigen recognizing molecule that binds to TROP2.

[0068] Disclosed herein, in some embodiments, are isolated polypeptides or polypeptide complexes according to Formula I:

A₂-A₁-L₁-P₁-H₁ (Formula I)

wherein: A₁ is a first antigen recognizing molecule that binds to an effector cell antigen; P₁ is a peptide that binds to A₁; L₁ is a linking moiety that connects A₁ to P₁ and is a substrate for a tumor specific protease; H₁ is a half-life extending molecule; and A₂ is a second antigen recognizing molecule that binds to TROP2.

[0069] Disclosed herein, in some embodiments, are isolated polypeptides or polypeptide complexes comprising Formula I:

A₂-A₁-L₁-P₁-H₁ (Formula I)

wherein: A₁ comprises a first antigen recognizing molecule that binds to an effector cell antigen; P₁ comprises a peptide that binds to A₁; L₁ comprises a linking moiety that connects A₁ to P₁ and is a substrate for a tumor specific protease; H₁ comprises a half-life extending molecule; and A₂ comprises a second antigen recognizing molecule that binds to TROP2.

[0070] Disclosed herein, in some embodiments, are isolated polypeptides or polypeptide complexes comprising Formula I:

A₂-A₁-L₁-P₁-H₁ (Formula I)

wherein: A₁ is a first antigen recognizing molecule that binds to an effector cell antigen; P₁ is a peptide that binds to A₁; L₁ is a linking moiety that connects A₁ to P₁ and is a substrate for a tumor specific protease; H₁ is a half-life extending molecule; and A₂ is a second antigen recognizing molecule that binds to TROP2.

[0071] Disclosed herein, in some embodiments, are isolated polypeptides or polypeptide complexes according to Formula I:

A₂-A₁-L₁-P₁-H₁ (Formula I)

wherein: A₁ comprises a first antigen recognizing molecule that binds to TROP2; P₁ comprises a peptide that binds to A₁; L₁ comprises a linking moiety that connects A₁ to P₁ and is a substrate for a tumor specific protease; H₁ comprises a half-life extending molecule; and A₂ comprises a second antigen recognizing molecule that binds to an effector cell antigen.

[0072] Disclosed herein, in some embodiments, are isolated polypeptides or polypeptide complexes according to Formula I:

A₂-A₁-L₁-P₁-H₁ (Formula I)

wherein: A₁ is a first antigen recognizing molecule that binds to TROP2; P₁ is a peptide that binds to A₁; L₁ is a linking moiety that connects A₁ to P₁ and is a substrate for a tumor specific protease; H₁ is a half-life extending molecule; and A₂ is a second antigen recognizing molecule that binds to effector cell antigen.

[0073] Disclosed herein, in some embodiments, are isolated polypeptides or polypeptide complexes comprising Formula I:

A₂-A₁-L₁-P₁-H₁ (Formula I)

wherein: A₁ comprises a first antigen recognizing molecule that binds to TROP2; P₁ comprises a peptide that binds to A₁; L₁ comprises a linking moiety that connects A₁ to P₁ and is a substrate for a tumor specific protease; H₁ comprises a half-life extending molecule; and A₂ comprises a second antigen recognizing molecule that binds to an effector cell antigen.

[0074] Disclosed herein, in some embodiments, are isolated polypeptides or polypeptide complexes comprising Formula I:

A₂-A₁-L₁-P₁-H₁ (Formula I)

wherein: A₁ is a first antigen recognizing molecule that binds to TROP2; P₁ is a peptide that binds to A₁; L₁ is a linking moiety that connects A₁ to P₁ and is a substrate for a tumor specific protease; H₁ is a half-life extending molecule; and A₂ is a second antigen recognizing molecule that binds to an effector cell antigen.

[0075] Disclosed herein, in some embodiments, are isolated polypeptides or polypeptide complexes according to Formula Ia:

P₂-L₂-A₂-A₁-L₁-P₁-H₁ (Formula Ia)

wherein A₂ further comprises P₂ and L₂, wherein P₂ comprises a peptide that binds to A₂; and L₂ comprises a linking moiety that connects A₂ to P₂ and is a substrate for a tumor specific protease.

[0076] Disclosed herein, in some embodiments, are isolated polypeptides or polypeptide complexes according to Formula Ia:

P₂-L₂-A₂-A₁-L₁-P₁-H₁ (Formula Ia)

wherein A₂ further comprises P₂ and L₂, wherein P₂ is a peptide that binds to A₂; and L₂ is a linking moiety that connects A₂ to P₂ and is a substrate for a tumor specific protease.

[0077] Disclosed herein, in some embodiments, are isolated polypeptides or polypeptide complexes comprising Formula Ia:

P₂-L₂-A₂-A₁-L₁-P₁-H₁ (Formula Ia)

wherein A₂ further comprises P₂ and L₂, wherein P₂ comprises a peptide that binds to A₂; and L₂ comprises a linking moiety that connects A₂ to P₂ and is a substrate for a tumor specific protease.

[0078] Disclosed herein, in some embodiments, are isolated polypeptides or polypeptide complexes comprising Formula Ia:

P₂-L₂-A₂-A₁-L₁-P₁-H₁ (Formula Ia)

wherein A₂ further comprises P₂ and L₂, wherein P₂ is a peptide that binds to A₂; and L₂ is a linking moiety that connects A₂ to P₂ and is a substrate for a tumor specific protease.

[0079] Disclosed herein, in some embodiments, are isolated polypeptides or polypeptide complexes according to Formula II:

L₁ₐ-P₁ₐ-H₁ₐ (Formula II)

wherein: L₁ₐ comprises a tumor specific protease-cleaved linking moiety that when uncleaved connects P₁ₐ to a first antigen recognizing molecule that binds to an effector cell antigen and the first antigen recognizing molecule is connected to a second antigen recognizing molecule that binds to TROP2; P₁ₐ comprises a peptide that binds to the first antigen recognizing molecule when L₁ₐ is uncleaved; and H₁ₐ comprises a half-life extending molecule.

[0080] Disclosed herein, in some embodiments, are isolated polypeptides or polypeptide complexes comprising Formula II:

L₁ₐ-P₁ₐ-H₁ₐ (Formula II)

wherein: L₁ₐ comprises a tumor specific protease-cleaved linking moiety that when uncleaved connects P₁ₐ to a first antigen recognizing molecule that binds to an effector cell antigen and the first antigen recognizing molecule is connected to a second antigen recognizing molecule that binds to TROP2; P₁ₐ comprises a peptide that binds to the first antigen recognizing molecule when L₁ₐ is uncleaved; and H₁ₐ comprises a half-life extending molecule.

[0081] Disclosed herein, in some embodiments, are isolated polypeptides or polypeptide complexes according to Formula II:

L₁ₐ-P₁ₐ-H₁ₐ (Formula II)

wherein: L₁ₐ is a tumor specific protease-cleaved linking moiety that when uncleaved connects P₁ₐ to a first antigen recognizing molecule that binds to an effector cell antigen and the first antigen recognizing molecule is connected to a second antigen recognizing molecule that binds to TROP2; P₁ₐ is a peptide that binds to the first antigen recognizing molecule when L₁ₐ is uncleaved; and H₁ₐ is a half-life extending molecule.

[0082] Disclosed herein, in some embodiments, are isolated polypeptides or polypeptide complexes comprising Formula II:

L₁ₐ-P₁ₐ-H₁ₐ (Formula II)

wherein: L₁ₐ is a tumor specific protease-cleaved linking moiety that when uncleaved connects P₁ₐ to a first antigen recognizing molecule that binds to an effector cell antigen and the first antigen recognizing molecule is connected to a second antigen recognizing molecule that binds to TROP2; P₁ₐ is a peptide that binds to the first antigen recognizing molecule when L₁ₐ is uncleaved; and H₁ₐ is a half-life extending molecule.

### First Antigen Recognizing Molecule (A₁)

[0083] Disclosed herein, in some embodiments, are polypeptides or polypeptide complexes, wherein the first antigen recognizing molecule binds to an effector cell antigen and the second antigen recognizing molecule binds to TROP2. In some embodiments, the effector cell antigen comprises CD3. In some embodiments, A₁ comprises a first antigen recognizing molecule that binds to an effector cell antigen.

[0084] In some embodiments, A₁ comprises an antibody or antibody fragment. In some embodiments, A₁ comprises an antibody or antibody fragment that is human or humanized. In some embodiments, L₁ is bound to N-terminus of the antibody or antibody fragment. In some embodiments, L₁ is bound to N-terminus of the antibody or antibody fragment and A₂ is bound to the other N-terminus of the antibody or antibody fragment. In some embodiments, A₂ is bound to C-terminus of the antibody or antibody fragment. In some embodiments, L₁ is bound to C-terminus of the antibody or antibody fragment. In some embodiments, A₂ is bound to N-terminus of the antibody or antibody fragment. In some embodiments, the antibody or antibody fragment comprises a single chain variable fragment, a single domain antibody, or a Fab fragment. In some embodiments, A₁ is the single chain variable fragment (scFv). In some embodiments, the scFv comprises a scFv heavy chain polypeptide and a scFv light chain polypeptide. In some embodiments, A₁ is the single domain antibody. In some embodiments, A₁ comprises a variable light chain and variable heavy chain each of which is capable of specifically binding to human CD3. In some embodiments, the effector cell antigen comprises CD3. In some embodiments, A₁ comprises an anti-CD3e single chain variable fragment. In some embodiments, A₁ comprises an anti-CD3e single chain variable fragment that has a K_{D} binding of 1 μM or less to CD3 on CD3 expressing cells. In some embodiments, A₁ comprises complementary determining regions (CDRs) selected from the group consisting of muromonab-CD3 (OKT3), otelixizumab (TRX4), teplizumab (MGA031), visilizumab (Nuvion), SP34, X35, VIT3, BMA030 (BW264/56), CLB-T3/3, CRIS7, YTH12.5, F111-409, CLB-T3.4.2, TR-66, WT32, SPv-T3b, 11D8, XIII-141, XIII-46, XIII-87, 12F6, T3/RW2-8C8, T3/RW2-4B6, OKT3D, M-T301, SMC2, F101.01, UCHT-1, WT-31, 15865, 15865v12, 15865v16, and 15865v19.

[0085] In some embodiments, A₁ comprises a first antigen recognizing molecule that binds TROP2. In some embodiments, A₁ comprises a variable light chain and variable heavy chain each of which is capable of specifically binding to human TROP2.

[0086] In some embodiments, the scFv that binds to CD3 comprises a scFv light chain variable domain and a scFv heavy chain variable domain. In some embodiments, the scFv heavy chain variable domain comprises at least one, two, or three complementarity determining regions (CDR)s disclosed in Table 1 or a sequence substantially identical thereto (e.g., a sequence that has at least 90%, 95%, 96%, 97%, 98%, or 99% sequence identity). In some embodiments, the scFv light chain variable domain comprises at least one, two, or three complementarity determining regions (CDR)s disclosed in Table 1 or a sequence substantially identical thereto (e.g., a sequence that has at least 90%, 95%, 96%, 97%, 98%, or 99% sequence identity).

[0087] In some embodiments, the scFv heavy chain variable domain comprises at least one, two, or three complementarity determining regions (CDR)s disclosed in Table 1 or a sequence substantially identical thereto (e.g., a sequence that has at least 90%, 95%, 96%, 97%, 98%, or 99% sequence identity); and the scFv light chain variable domain comprises at least one, two, or three complementarity determining regions (CDR)s disclosed in Table 1 or a sequence substantially identical thereto (e.g., a sequence that has at least 90%, 95%, 96%, 97%, 98%, or 99% sequence identity).

TABLE 1
anti-CD3 amino acid sequences (CDRs as determined by IMGT numbering system)

| | Amino Acid Sequence | SEQ ID |
|---|---|---|
| Construct Description | (N to C) | NO: |
| SP34.185 CD3: HC: CDR1 | GFTFNKYA | 1 |
| SP34.185 CD3: HC: CDR2 | IRSKYNNYAT | 2 |
| SP34.185 CD3: HC: CDR3 | VRHGNFGNSYISYWAY | 3 |
| SP34.185 CD3: LC: CDR1 | TGAVTSGNY | 4 |
| SP34.185 CD3: LC: CDR2 | GTK | 5 |
| SP34.185 CD3: LC: CDR3 | VLWYSNRWV | 6 |
| SP34.194 CD3: HC: CDR1 | GFTFNTYA | 7 |
| SP34.194 CD3: HC: CDR2 | IRSKYNNYAT | 8 |
| SP34.194 CD3: HC: CDR3 | VRHGNFGNSYVSWFAY | 9 |
| SP34.194 CD3: LC: CDR1 | TGAVTTSNY | 10 |
| SP34.194 CD3: LC: CDR2 | GT | 11 |
| SP34.194 CD3: LC: CDR3 | ALWYSNLWV | 12 |
| SP34.185 scFv | EVQLVESGGGLVQPGGSLKLSCA | 13 |
| (VH-linker 1-VL) | ASGFTFNKYAMNWVRQAPGKG | |
| | LEWVARIRSKYNNYATYYADSV | |
| | KDRFTISRDDSKNTAYLQMNNLK | |
| | TEDTAVYYCVRHGNFGNSYISY | |
| | WAYWGQGTLVTVSSGGGGSGGG | |
| | GSGGGGSQTVVTQEPSLTVSPGG | |
| | TVTLTCGSSTGAVTSGNYPNWV | |
| | QQKPGQAPRGLIGGTKFLAPGTP | |
| | ARFSGSLLGGKAALTLSGVQPED | |
| | EAEYYCVLWYSNRWVFGGGTKL | |
| | TVL | |
| SP34.194 scFv | QTVVTQEPSLTVSPGGTVTLTCRS | 14 |
| (VL-linker 1-VH) | STGAVTTSNYANWVQQKPGQAP | |
| | RGLIGGTNKRAPGTPARFSGSLLG | |
| | GKAALTLSGVQPEDEAEYYCAL | |
| | WYSNLWVFGGGTKLTVLGGGGS | |
| | GGGGSGGGGSEVQLVESGGGLV | |
| | QPGGSLKLSCAASGFTFNTYAMN | |
| | WVRQAPGKGLEWVARIRSKYNN | |
| | YATYYADSVKDRFTISRDDSKNT | |
| | AYLQMNNLKTEDTAVYYCVRHG | |
| | NFGNSYVSWFAYWGQGTLVTVS | |
| | S | |

[0088] In some embodiments, the scFv heavy chain variable domain comprises complementarity determining regions (CDRs): HC-CDR1, HC-CDR2, and HC-CDR3, wherein the HC-CDR1, the HC-CDR2, and the HC-CDR3 of the scFv heavy chain variable domain comprise: HC-CDR1: SEQ ID NO: 1; HC-CDR2: SEQ ID NO: 2; HC-CDR3: SEQ ID NO: 3, and wherein the CDRs comprise from 0-2 amino acid modifications in at least one of the HC-CDR1, HC-CDR2, or HC-CDR3. In some embodiments, the scFv heavy chain variable domain comprises complementarity determining regions (CDRs): HC-CDR1, HC-CDR2, and HC-CDR3, wherein the HC-CDR1, the HC-CDR2, and the HC-CDR3 of the scFv heavy chain variable domain comprise: HC-CDR1: SEQ ID NO: 7; HC-CDR2: SEQ ID NO: 8; HC-CDR3: SEQ ID NO: 9, and wherein the CDRs comprise from 0-2 amino acid modifications in at least one of the HC-CDR1, HC-CDR2, or HC-CDR3. In some embodiments, the scFv light chain variable domain comprises complementarity determining regions (CDRs): LC-CDR1, LC-CDR2, and LC-CDR3, wherein the LC-CDR1, the LC-CDR2, and the LC-CDR3 of the scFv light chain variable domain comprise: LC-CDR11: SEQ ID NO: 4; LC-CDR2: SEQ ID NO: 5; and LC-CDR3: SEQ ID NO: 6, and wherein the CDRs comprise from 0-2 amino acid modifications in at least one of the LC-CDR1, LC-CDR2, or LC-CDR3. In some embodiments, the scFv light chain variable domain comprises complementarity determining regions (CDRs): LC-CDR1, LC-CDR2, and LC-CDR3, wherein the LC-CDR1, the LC-CDR2, and the LC-CDR3 of the scFv light chain variable domain comprise: LC-CDR1: SEQ ID NO: 10; LC-CDR2: SEQ ID NO: 11; and LC-CDR3: SEQ ID NO: 12, and wherein the CDRs comprise from 0-2 amino acid modifications in at least one of the LC-CDR1, LC-CDR2, or LC-CDR3.

[0089] In some embodiments, the effector cell antigen comprises CD3, wherein A₁ comprises complementarity determining regions (CDRs): HC-CDR1, HC-CDR2, and HC-CDR3, wherein the HC-CDR1, the HC-CDR2, and the HC-CDR3 of A₁ comprise: HC-CDR1: SEQ ID NO: 1, HC-CDR2: SEQ ID NO: 2, and HC-CDR3: SEQ ID NO: 3; and A₁ comprises CDRs: LC-CDR1, LC-CDR2, and LC-CDR3, wherein the LC-CDR1, the LC-CDR2, and the LC-CDR3 of A₁ comprise LC-CDR1: SEQ ID NO: 4, LC-CDR2: SEQ ID NO:5, and LC-CDR3: SEQ ID NO: 6.

[0090] In some embodiments, the effector cell antigen comprises CD3, wherein A₁ comprises complementarity determining regions (CDRs): HC-CDR1, HC-CDR2, and HC-CDR3, wherein the HC-CDR1, the HC-CDR2, and the HC-CDR3 of A₁ comprise: HC-CDR1: SEQ ID NO: 7, HC-CDR2: SEQ ID NO: 8, and HC-CDR3: SEQ ID NO: 9; and A₁ comprises CDRs: LC-CDR1, LC-CDR2, and LC-CDR3, wherein the LC-CDR1, the LC-CDR2, and the LC-CDR3 of A₁ comprise LC-CDR1: SEQ ID NO: 10, LC-CDR2: SEQ ID NO: 11, and LC-CDR3: SEQ ID NO: 12.

[0091] In some embodiments, the isolated polypeptide or polypeptide complex of Formula I binds to an effector cell when L₁ is cleaved by the tumor specific protease. In some embodiments, the isolated polypeptide or polypeptide complex of Formula I binds to an effector cell when L₁ is cleaved by the tumor specific protease and A₁ binds to the effector cell. In some embodiments, the effector cell is a T cell. In some embodiments, A₁ binds to a polypeptide that is part of a TCR-CD3 complex on the effector cell. In some embodiments, the polypeptide that is part of the TCR-CD3 complex is human CD3ε. In some embodiments, the effector cell antigen comprises CD3, wherein the scFv comprises complementarity determining regions (CDRs): HC-CDR1, HC-CDR2, and HC-CDR3, wherein the HC-CDR1, the HC-CDR2, and the HC-CDR3 of the scFv: HC-CDR1: SEQ ID NO: 1, HC-CDR2: SEQ ID NO: 2, and HC-CDR3: SEQ ID NO: 3; and the scFv comprises CDRs: LC-CDR1, LC-CDR2, and LC-CDR3, wherein the LC-CDR1, the LC-CDR2, and the LC-CDR3 of the scFv LC-CDR1: SEQ ID NO: 4, LC-CDR2: SEQ ID NO:5, and LC-CDR3: SEQ ID NO: 6. In some embodiments, the effector cell antigen comprises CD3, and the scFv comprises an amino acid sequence according to SEQ ID NO: 13. In some embodiments, the effector cell antigen comprises CD3, wherein the scFv comprises complementarity determining regions (CDRs): HC-CDR1, HC-CDR2, and HC-CDR3, wherein the HC-CDR1, the HC-CDR2, and the HC-CDR3 of the scFv: HC-CDR1: SEQ ID NO: 7, HC-CDR2: SEQ ID NO: 8, and HC-CDR3: SEQ ID NO: 9; and the scFv comprises CDRs: LC-CDR1, LC-CDR2, and LC-CDR3, wherein the LC-CDR1, the LC-CDR2, and the LC-CDR3 of the scFv LC-CDR1: SEQ ID NO: 10, LC-CDR2: SEQ ID NO: 11, and LC-CDR3: SEQ ID NO: 12. In some embodiments, the effector cell antigen comprises CD3, and the scFv comprises an amino acid sequence according to SEQ ID NO: 14.

[0092] In some embodiments, A₁ comprises an amino acid sequence according to SEQ ID NO: 13. In some embodiments, A₁ comprises an amino acid sequence that has at least 80% sequence identity to SEQ ID NO: 13. In some embodiments, A₁ comprises an amino acid sequence that has at least 85% sequence identity to SEQ ID NO: 13. In some embodiments, A₁ comprises an amino acid sequence that has at least 90% sequence identity to SEQ ID NO: 13. In some embodiments, A₁ comprises an amino acid sequence that has at least 95% sequence identity to SEQ ID NO: 13. In some embodiments, A₁ comprises an amino acid sequence that has at least 99% sequence identity to SEQ ID NO: 13.

[0093] In some embodiments, A₁ comprises an amino acid sequence according to SEQ ID NO: 14. In some embodiments, A₁ comprises an amino acid sequence that has at least 80% sequence identity to SEQ ID NO: 14. In some embodiments, A₁ comprises an amino acid sequence that has at least 85% sequence identity to SEQ ID NO: 14. In some embodiments, A₁ comprises an amino acid sequence that has at least 90% sequence identity to SEQ ID NO: 14. In some embodiments, A₁ comprises an amino acid sequence that has at least 95% sequence identity to SEQ ID NO: 14. In some embodiments, A₁ comprises an amino acid sequence that has at least 99% sequence identity to SEQ ID NO: 14.

[0094] In some embodiments, the isolated polypeptide or polypeptide complex has weaker binding affinity for the tumor cell antigen as compared to the binding affinity for the tumor cell antigen of an isolated polypeptide or polypeptide complex that does not have P₁ or L₁. In some embodiments, the isolated polypeptide or polypeptide complex has weaker binding affinity for the tumor cell antigen that is at least 5× higher than the binding affinity for the tumor cell antigen of a form of the isolated polypeptide or polypeptide complex that does not have P₁ or L₁. In some embodiments, the isolated polypeptide or polypeptide complex has weaker binding affinity for the tumor cell antigen that is at least 8× higher than the binding affinity for the tumor cell antigen of a form of the isolated polypeptide or polypeptide complex that does not have P₁ or L₁. In some embodiments, the isolated polypeptide or polypeptide complex has weaker binding affinity for the tumor cell antigen that is at least 10× higher than the binding affinity for the tumor cell antigen of a form of the isolated polypeptide or polypeptide complex that does not have P₁ or L₁. In some embodiments, the isolated polypeptide or polypeptide complex has weaker binding affinity for the tumor cell antigen that is at least 15× higher than the binding affinity for the tumor cell antigen of a form of the isolated polypeptide or polypeptide complex that does not have P₁ or L₁. In some embodiments, the isolated polypeptide or polypeptide complex has weaker binding affinity for the tumor cell antigen that is at least 20× higher than the binding affinity for the tumor cell antigen of a form of the isolated polypeptide or polypeptide complex that does not have P₁ or L₁. In some embodiments, the isolated polypeptide or polypeptide complex has weaker binding affinity for the tumor cell antigen that is at least 25× higher than the binding affinity for the tumor cell antigen of a form of the isolated polypeptide or polypeptide complex that does not have P₁ or L₁. In some embodiments, the isolated polypeptide or polypeptide complex has weaker binding affinity for the tumor cell antigen that is at least 30× higher than the binding affinity for the tumor cell antigen of a form of the isolated polypeptide or polypeptide complex that does not have P₁ or L₁. In some embodiments, the isolated polypeptide or polypeptide complex has weaker binding affinity for the tumor cell antigen that is at least 35× higher than the binding affinity for the tumor cell antigen of a form of the isolated polypeptide or polypeptide complex that does not have P₁ or L₁. In some embodiments, the isolated polypeptide or polypeptide complex has weaker binding affinity for the tumor cell antigen that is at least 40× higher than the binding affinity for the tumor cell antigen of a form of the isolated polypeptide or polypeptide complex that does not have P₁ or L₁. In some embodiments, the isolated polypeptide or polypeptide complex has weaker binding affinity for the tumor cell antigen that is at least 45× higher than the binding affinity for the tumor cell antigen of a form of the isolated polypeptide or polypeptide complex that does not have P₁ or L₁. In some embodiments, the isolated polypeptide or polypeptide complex has weaker binding affinity for the tumor cell antigen that is at least 50× higher than the binding affinity for the tumor cell antigen of a form of the isolated polypeptide or polypeptide complex that does not have P₁ or L₁. In some embodiments, the isolated polypeptide or polypeptide complex has weaker binding affinity for the tumor cell antigen that is at least 55× higher than the binding affinity for the tumor cell antigen of a form of the isolated polypeptide or polypeptide complex that does not have P₁ or L₁. In some embodiments, the isolated polypeptide or polypeptide complex has weaker binding affinity for the tumor cell antigen that is at least 60× higher than the binding affinity for the tumor cell antigen of a form of the isolated polypeptide or polypeptide complex that does not have P₁ or L₁. In some embodiments, the isolated polypeptide or polypeptide complex has weaker binding affinity for the tumor cell antigen that is at least 65× higher than the binding affinity for the tumor cell antigen of a form of the isolated polypeptide or polypeptide complex that does not have P₁ or L₁. In some embodiments, the isolated polypeptide or polypeptide complex has weaker binding affinity for the tumor cell antigen that is at least 70× higher than the binding affinity for the tumor cell antigen of a form of the isolated polypeptide or polypeptide complex that does not have P₁ or L₁. In some embodiments, the isolated polypeptide or polypeptide complex has weaker binding affinity for the tumor cell antigen that is at least 75× higher than the binding affinity for the tumor cell antigen of a form of the isolated polypeptide or polypeptide complex that does not have P₁ or L₁. In some embodiments, the isolated polypeptide or polypeptide complex has weaker binding affinity for the tumor cell antigen that is at least 80× higher than the binding affinity for the tumor cell antigen of a form of the isolated polypeptide or polypeptide complex that does not have P₁ or L₁. In some embodiments, the isolated polypeptide or polypeptide complex has weaker binding affinity for the tumor cell antigen that is at least 85× higher than the binding affinity for the tumor cell antigen of a form of the isolated polypeptide or polypeptide complex that does not have P₁ or L₁. In some embodiments, the isolated polypeptide or polypeptide complex has weaker binding affinity for the tumor cell antigen that is at least 90× higher than the binding affinity for the tumor cell antigen of a form of the isolated polypeptide or polypeptide complex that does not have P₁ or L₁. In some embodiments, the isolated polypeptide or polypeptide complex has weaker binding affinity for the tumor cell antigen that is at least 95× higher than the binding affinity for the tumor cell antigen of a form of the isolated polypeptide or polypeptide complex that does not have P₁ or L₁. In some embodiments, the isolated polypeptide or polypeptide complex has weaker binding affinity for the tumor cell antigen that is at least 100× higher than the binding affinity for the tumor cell antigen of a form of the isolated polypeptide or polypeptide complex that does not have P₁ or L₁. In some embodiments, the isolated polypeptide or polypeptide complex has weaker binding affinity for the tumor cell antigen that is at least 120× higher than the binding affinity for the tumor cell antigen of a form of the isolated polypeptide or polypeptide complex that does not have P₁ or L₁. In some embodiments, the isolated polypeptide or polypeptide complex has weaker binding affinity for the tumor cell antigen that is at least 1000× higher than the binding affinity for the tumor cell antigen of a form of the isolated polypeptide or polypeptide complex that does not have P₁ or L₁.

[0095] In some embodiments, the isolated polypeptide or polypeptide complex has weaker binding affinity for the tumor cell antigen as compared to the binding affinity for the tumor cell antigen of the isolated polypeptide or polypeptide complex in which L₁ has been cleaved by the tumor specific protease. In some embodiments, the isolated polypeptide or polypeptide complex has weaker binding affinity for the tumor cell antigen that is at least 5× higher than the binding affinity for the tumor cell antigen of the isolated polypeptide or polypeptide complex in which L₁ has been cleaved by the tumor specific protease. In some embodiments, the isolated polypeptide or polypeptide complex has weaker binding affinity for the tumor cell antigen that is at least 8× higher than the binding affinity for the tumor cell antigen of the isolated polypeptide or polypeptide complex in which L₁ has been cleaved by the tumor specific protease. In some embodiments, the isolated polypeptide or polypeptide complex has weaker binding affinity for the tumor cell antigen that is at least 10× higher than the binding affinity for the tumor cell antigen of the isolated polypeptide or polypeptide complex in which L₁ has been cleaved by the tumor specific protease. In some embodiments, the isolated polypeptide or polypeptide complex has weaker binding affinity for the tumor cell antigen that is at least 15× higher than the binding affinity for the tumor cell antigen of the isolated polypeptide or polypeptide complex in which L₁ has been cleaved by the tumor specific protease. In some embodiments, the isolated polypeptide or polypeptide complex has weaker binding affinity for the tumor cell antigen that is at least 20× higher than the binding affinity for the tumor cell antigen of the isolated polypeptide or polypeptide complex in which L₁ has been cleaved by the tumor specific protease. In some embodiments, the isolated polypeptide or polypeptide complex has weaker binding affinity for the tumor cell antigen that is at least 25× higher than the binding affinity for the tumor cell antigen of the isolated polypeptide or polypeptide complex in which L₁ has been cleaved by the tumor specific protease. In some embodiments, the isolated polypeptide or polypeptide complex has weaker binding affinity for the tumor cell antigen that is at least 30× higher than the binding affinity for the tumor cell antigen of the isolated polypeptide or polypeptide complex in which L₁ has been cleaved by the tumor specific protease. In some embodiments, the isolated polypeptide or polypeptide complex has weaker binding affinity for the tumor cell antigen that is at least 35× higher than the binding affinity for the tumor cell antigen of the isolated polypeptide or polypeptide complex in which L₁ has been cleaved by the tumor specific protease. In some embodiments, the isolated polypeptide or polypeptide complex has weaker binding affinity for the tumor cell antigen that is at least 40× higher than the binding affinity for the tumor cell antigen of the isolated polypeptide or polypeptide complex in which L₁ has been cleaved by the tumor specific protease. In some embodiments, the isolated polypeptide or polypeptide complex has weaker binding affinity for the tumor cell antigen that is at least 45× higher than the binding affinity for the tumor cell antigen of the isolated polypeptide or polypeptide complex in which L₁ has been cleaved by the tumor specific protease. In some embodiments, the isolated polypeptide or polypeptide complex has weaker binding affinity for the tumor cell antigen that is at least 50× higher than the binding affinity for the tumor cell antigen of the isolated polypeptide or polypeptide complex in which L₁ has been cleaved by the tumor specific protease. In some embodiments, the isolated polypeptide or polypeptide complex has weaker binding affinity for the tumor cell antigen that is at least 55× higher than the binding affinity for the tumor cell antigen of the isolated polypeptide or polypeptide complex in which L₁ has been cleaved by the tumor specific protease. In some embodiments, the isolated polypeptide or polypeptide complex has weaker binding affinity for the tumor cell antigen that is at least 60× higher than the binding affinity for the tumor cell antigen of the isolated polypeptide or polypeptide complex in which L₁ has been cleaved by the tumor specific protease. In some embodiments, the isolated polypeptide or polypeptide complex has weaker binding affinity for the tumor cell antigen that is at least 65× higher than the binding affinity for the tumor cell antigen of the isolated polypeptide or polypeptide complex in which L₁ has been cleaved by the tumor specific protease. In some embodiments, the isolated polypeptide or polypeptide complex has weaker binding affinity for the tumor cell antigen that is at least 70× higher than the binding affinity for the tumor cell antigen of the isolated polypeptide or polypeptide complex in which L₁ has been cleaved by the tumor specific protease. In some embodiments, the isolated polypeptide or polypeptide complex has weaker binding affinity for the tumor cell antigen that is at least 75× higher than the binding affinity for the tumor cell antigen of the isolated polypeptide or polypeptide complex in which L₁ has been cleaved by the tumor specific protease. In some embodiments, the isolated polypeptide or polypeptide complex has weaker binding affinity for the tumor cell antigen that is at least 80× higher than the binding affinity for the tumor cell antigen of the isolated polypeptide or polypeptide complex in which L₁ has been cleaved by the tumor specific protease. In some embodiments, the isolated polypeptide or polypeptide complex has weaker binding affinity for the tumor cell antigen that is at least 85× higher than the binding affinity for the tumor cell antigen of the isolated polypeptide or polypeptide complex in which L₁ has been cleaved by the tumor specific protease. In some embodiments, the isolated polypeptide or polypeptide complex has weaker binding affinity for the tumor cell antigen that is at least 90× higher than the binding affinity for the tumor cell antigen of the isolated polypeptide or polypeptide complex in which L₁ has been cleaved by the tumor specific protease. In some embodiments, the isolated polypeptide or polypeptide complex has weaker binding affinity for the tumor cell antigen that is at least 95× higher than the binding affinity for the tumor cell antigen of the isolated polypeptide or polypeptide complex in which L₁ has been cleaved by the tumor specific protease. In some embodiments, the isolated polypeptide or polypeptide complex has weaker binding affinity for the tumor cell antigen that is at least 100× higher than the binding affinity for the tumor cell antigen of the isolated polypeptide or polypeptide complex in which L₁ has been cleaved by the tumor specific protease. In some embodiments, the isolated polypeptide or polypeptide complex has weaker binding affinity for the tumor cell antigen that is at least 120× higher than the binding affinity for the tumor cell antigen of the isolated polypeptide or polypeptide complex in which L₁ has been cleaved by the tumor specific protease. In some embodiments, the isolated polypeptide or polypeptide complex has weaker binding affinity for the tumor cell antigen that is at least 1000× higher than the binding affinity for the tumor cell antigen of the isolated polypeptide or polypeptide complex in which L₁ has been cleaved by the tumor specific protease.

[0096] In some embodiments, the isolated polypeptide or polypeptide complex has an increased EC₅₀ in an IFNγ release T-cell activation assay as compared to the EC₅₀ in an IFNγ release T-cell activation assay of an isolated polypeptide or polypeptide complex that does not have P₁ or L₁. In some embodiments, the isolated polypeptide or polypeptide complex has an increased EC₅₀ in an IFNγ release T-cell activation assay that is at least 10× higher than the EC₅₀ in an IFNγ release T-cell activation assay of a form of the isolated polypeptide or polypeptide complex that does not have P₁ or L₁. In some embodiments, the isolated polypeptide or polypeptide complex has an increased EC₅₀ in an IFNγ release T-cell activation assay that is at least 20× higher than the EC₅₀ in an IFNγ release T-cell activation assay of a form of the isolated polypeptide or polypeptide complex that does not have P₁ or L₁. In some embodiments, the isolated polypeptide or polypeptide complex has an increased EC₅₀ in an IFNγ release T-cell activation assay that is at least 30× higher than the EC₅₀ in an IFNγ release T-cell activation assay of a form of the isolated polypeptide or polypeptide complex that does not have P₁ or L₁. In some embodiments, the isolated polypeptide or polypeptide complex has an increased EC₅₀ in an IFNγ release T-cell activation assay that is at least 40× higher than the EC₅₀ in an IFNγ release T-cell activation assay of a form of the isolated polypeptide or polypeptide complex that does not have P₁ or L₁. In some embodiments, the isolated polypeptide or polypeptide complex has an increased EC₅₀ in an IFNγ release T-cell activation assay that is at least 50× higher than the EC₅₀ in an IFNγ release T-cell activation assay of a form of the isolated polypeptide or polypeptide complex that does not have P₁ or L₁. In some embodiments, the isolated polypeptide or polypeptide complex has an increased EC₅₀ in an IFNγ release T-cell activation assay that is at least 60× higher than the EC₅₀ in an IFNγ release T-cell activation assay of a form of the isolated polypeptide or polypeptide complex that does not have P₁ or L₁. In some embodiments, the isolated polypeptide or polypeptide complex has an increased EC₅₀ in an IFNγ release T-cell activation assay that is at least 70× higher than the EC₅₀ in an IFNγ release T-cell activation assay of a form of the isolated polypeptide or polypeptide complex that does not have P₁ or L₁. In some embodiments, the isolated polypeptide or polypeptide complex has an increased EC₅₀ in an IFNγ release T-cell activation assay that is at least 80× higher than the EC₅₀ in an IFNγ release T-cell activation assay of a form of the isolated polypeptide or polypeptide complex that does not have P₁ or L₁. In some embodiments, the isolated polypeptide or polypeptide complex has an increased EC₅₀ in an IFNγ release T-cell activation assay that is at least 90× higher than the EC₅₀ in an IFNγ release T-cell activation assay of a form of the isolated polypeptide or polypeptide complex that does not have P₁ or L₁. In some embodiments, the isolated polypeptide or polypeptide complex has an increased EC₅₀ in an IFNγ release T-cell activation assay that is at least 100× higher than the EC₅₀ in an IFNγ release T-cell activation assay of a form of the isolated polypeptide or polypeptide complex that does not have P₁ or L₁. In some embodiments, the isolated polypeptide or polypeptide complex has an increased EC₅₀ in an IFNγ release T-cell activation assay that is at least 1000× higher than the EC₅₀ in an IFNγ release T-cell activation assay of a form of the isolated polypeptide or polypeptide complex that does not have P₁ or L₁.

[0097] In some embodiments, the isolated polypeptide or polypeptide complex has an increased EC₅₀ in an IFNγ release T-cell activation assay as compared to the EC₅₀ in an IFNγ release T-cell activation assay of the isolated polypeptide or polypeptide complex in which L₁ has been cleaved by the tumor specific protease. In some embodiments, the isolated polypeptide or polypeptide complex has an increased EC₅₀ in an IFNγ release T-cell activation assay that is at least 10× higher than the EC₅₀ in an IFNγ release T-cell activation assay of the isolated polypeptide or polypeptide complex in which L₁ has been cleaved by the tumor specific protease. In some embodiments, the isolated polypeptide or polypeptide complex has an increased EC₅₀ in an IFNγ release T-cell activation assay that is at least 20× higher than the EC₅₀ in an IFNγ release T-cell activation assay of the isolated polypeptide or polypeptide complex in which L₁ has been cleaved by the tumor specific protease. In some embodiments, the isolated polypeptide or polypeptide complex has an increased EC₅₀ in an IFNγ release T-cell activation assay that is at least 30× higher than the EC₅₀ in an IFNγ release T-cell activation assay of the isolated polypeptide or polypeptide complex in which L₁ has been cleaved by the tumor specific protease. In some embodiments, the isolated polypeptide or polypeptide complex has an increased EC₅₀ in an IFNγ release T-cell activation assay that is at least 40× higher than the EC₅₀ in an IFNγ release T-cell activation assay of the isolated polypeptide or polypeptide complex in which L₁ has been cleaved by the tumor specific protease. In some embodiments, the isolated polypeptide or polypeptide complex has an increased EC₅₀ in an IFNγ release T-cell activation assay that is at least 50× higher than the EC₅₀ in an IFNγ release T-cell activation assay of the isolated polypeptide or polypeptide complex in which L₁ has been cleaved by the tumor specific protease. In some embodiments, the isolated polypeptide or polypeptide complex has an increased EC₅₀ in an IFNγ release T-cell activation assay that is at least 60× higher than the EC₅₀ in an IFNγ release T-cell activation assay of the isolated polypeptide or polypeptide complex in which L₁ has been cleaved by the tumor specific protease. In some embodiments, the isolated polypeptide or polypeptide complex has an increased EC₅₀ in an IFNγ release T-cell activation assay that is at least 70× higher than the EC₅₀ in an IFNγ release T-cell activation assay of the isolated polypeptide or polypeptide complex in which L₁ has been cleaved by the tumor specific protease. In some embodiments, the isolated polypeptide or polypeptide complex has an increased EC₅₀ in an IFNγ release T-cell activation assay that is at least 80× higher than the EC₅₀ in an IFNγ release T-cell activation assay of the isolated polypeptide or polypeptide complex in which L₁ has been cleaved by the tumor specific protease. In some embodiments, the isolated polypeptide or polypeptide complex has an increased EC₅₀ in an IFNγ release T-cell activation assay that is at least 90× higher than the EC₅₀ in an IFNγ release T-cell activation assay of the isolated polypeptide or polypeptide complex in which L₁ has been cleaved by the tumor specific protease. In some embodiments, the isolated polypeptide or polypeptide complex has an increased EC₅₀ in an IFNγ release T-cell activation assay that is at least 100× higher than the EC₅₀ in an IFNγ release T-cell activation assay of the isolated polypeptide or polypeptide complex in which L₁ has been cleaved by the tumor specific protease. In some embodiments, the isolated polypeptide or polypeptide complex has an increased EC₅₀ in an IFNγ release T-cell activation assay that is at least 1000× higher than the EC₅₀ in an IFNγ release T-cell activation assay of the isolated polypeptide or polypeptide complex in which L₁ has been cleaved by the tumor specific protease.

[0098] In some embodiments, the isolated polypeptide or polypeptide complex has an increased EC₅₀ in a T-cell cytolysis assay as compared to the EC₅₀ in a T-cell cytolysis assay of an isolated polypeptide or polypeptide complex that does not have P₁ or L₁. In some embodiments, the isolated polypeptide or polypeptide complex has an increased EC₅₀ in a T-cell cytolysis assay that is at least 10× higher than the EC₅₀ in a T-cell cytolysis assay of a form of the isolated polypeptide or polypeptide complex that does not have P₁ or L₁. In some embodiments, the isolated polypeptide or polypeptide complex has an increased EC₅₀ in a T-cell cytolysis assay that is at least 20× higher than the EC₅₀ in a T-cell cytolysis assay of a form of the isolated polypeptide or polypeptide complex that does not have P₁ or L₁. In some embodiments, the isolated polypeptide or polypeptide complex has an increased EC₅₀ in a T-cell cytolysis assay that is at least 30× higher than the EC₅₀ in a T-cell cytolysis assay of a form of the isolated polypeptide or polypeptide complex that does not have P₁ or L₁. In some embodiments, the isolated polypeptide or polypeptide complex has an increased EC₅₀ in a T-cell cytolysis assay that is at least 40× higher than the EC₅₀ in a T-cell cytolysis assay of a form of the isolated polypeptide or polypeptide complex that does not have P₁ or L₁. In some embodiments, the isolated polypeptide or polypeptide complex has an increased EC₅₀ in a T-cell cytolysis assay that is at least 50× higher than the EC₅₀ in a T-cell cytolysis assay of a form of the isolated polypeptide or polypeptide complex that does not have P₁ or L₁. In some embodiments, the isolated polypeptide or polypeptide complex has an increased EC₅₀ in a T-cell cytolysis assay that is at least 60× higher than the EC₅₀ in a T-cell cytolysis assay of a form of the isolated polypeptide or polypeptide complex that does not have P₁ or L₁. In some embodiments, the isolated polypeptide or polypeptide complex has an increased EC₅₀ in a T-cell cytolysis assay that is at least 70× higher than the EC₅₀ in a T-cell cytolysis assay of a form of the isolated polypeptide or polypeptide complex that does not have P₁ or L₁. In some embodiments, the isolated polypeptide or polypeptide complex has an increased EC₅₀ in a T-cell cytolysis assay that is at least 80× higher than the EC₅₀ in a T-cell cytolysis assay of a form of the isolated polypeptide or polypeptide complex that does not have P₁ or L₁. In some embodiments, the isolated polypeptide or polypeptide complex has an increased EC₅₀ in a T-cell cytolysis assay that is at least 90× higher than the EC₅₀ in a T-cell cytolysis assay of a form of the isolated polypeptide or polypeptide complex that does not have P₁ or L₁. In some embodiments, the isolated polypeptide or polypeptide complex has an increased EC₅₀ in a T-cell cytolysis assay that is at least 100× higher than the EC₅₀ in a T-cell cytolysis assay of an isolated polypeptide or polypeptide complex that does not have P₁ or L₁. In some embodiments, the isolated polypeptide or polypeptide complex has an increased EC₅₀ in a T-cell cytolysis assay that is at least 1000× higher than the EC₅₀ in a T-cell cytolysis assay of an isolated polypeptide or polypeptide complex that does not have P₁ or L₁.

[0099] In some embodiments, the isolated polypeptide or polypeptide complex has an increased EC₅₀ in a T-cell cytolysis assay as compared to the EC₅₀ in a T-cell cytolysis assay of the isolated polypeptide or polypeptide complex in which L₁ has been cleaved by the tumor specific protease. In some embodiments, the isolated polypeptide or polypeptide complex has an increased EC₅₀ in a T-cell cytolysis assay that is at least 10× higher than the EC₅₀ in a T-cell cytolysis assay of the isolated polypeptide or polypeptide complex in which L₁ has been cleaved by the tumor specific protease. In some embodiments, the isolated polypeptide or polypeptide complex has an increased EC₅₀ in a T-cell cytolysis assay that is at least 20× higher than the EC₅₀ in a T-cell cytolysis assay of the isolated polypeptide or polypeptide complex in which L₁ has been cleaved by the tumor specific protease. In some embodiments, the isolated polypeptide or polypeptide complex has an increased EC₅₀ in a T-cell cytolysis assay that is at least 30× higher than the EC₅₀ in a T-cell cytolysis assay of the isolated polypeptide or polypeptide complex in which L₁ has been cleaved by the tumor specific protease. In some embodiments, the isolated polypeptide or polypeptide complex has an increased EC₅₀ in a T-cell cytolysis assay that is at least 40× higher than the EC₅₀ in a T-cell cytolysis assay of the isolated polypeptide or polypeptide complex in which L₁ has been cleaved by the tumor specific protease. In some embodiments, the isolated polypeptide or polypeptide complex has an increased EC₅₀ in a T-cell cytolysis assay that is at least 50× higher than the EC₅₀ in a T-cell cytolysis assay of the isolated polypeptide or polypeptide complex in which L₁ has been cleaved by the tumor specific protease. In some embodiments, the isolated polypeptide or polypeptide complex has an increased EC₅₀ in a T-cell cytolysis assay that is at least 60× higher than the EC₅₀ in a T-cell cytolysis assay of the isolated polypeptide or polypeptide complex in which L₁ has been cleaved by the tumor specific protease. In some embodiments, the isolated polypeptide or polypeptide complex has an increased EC₅₀ in a T-cell cytolysis assay that is at least 70× higher than the EC₅₀ in a T-cell cytolysis assay of the isolated polypeptide or polypeptide complex in which L₁ has been cleaved by the tumor specific protease. In some embodiments, the isolated polypeptide or polypeptide complex has an increased EC₅₀ in a T-cell cytolysis assay that is at least 80× higher than the EC₅₀ in a T-cell cytolysis assay of the isolated polypeptide or polypeptide complex in which L₁ has been cleaved by the tumor specific protease. In some embodiments, the isolated polypeptide or polypeptide complex has an increased EC₅₀ in a T-cell cytolysis assay that is at least 90× higher than the EC₅₀ in a T-cell cytolysis assay of the isolated polypeptide or polypeptide complex in which L₁ has been cleaved by the tumor specific protease. In some embodiments, the isolated polypeptide or polypeptide complex has an increased EC₅₀ in a T-cell cytolysis assay that is at least 100× higher than the EC₅₀ in a T-cell cytolysis assay of the isolated polypeptide or polypeptide complex in which L₁ has been cleaved by the tumor specific protease. In some embodiments, the isolated polypeptide or polypeptide complex has an increased EC₅₀ in a T-cell cytolysis assay that is at least 1,000× higher than the EC₅₀ in a T-cell cytolysis assay of the isolated polypeptide or polypeptide complex in which L₁ has been cleaved by the tumor specific protease.

[0100] In some embodiments, the isolated polypeptide or polypeptide complex P₂-L₂-A₂-A₁-L₁-P₁-H₁ (Formula Ia) has weaker binding affinity for the tumor cell antigen as compared to the binding affinity for the tumor cell antigen of an isolated polypeptide or polypeptide complex of Formula Ia that does not have P₁, L₁, P₂, or L₂. In some embodiments, the isolated polypeptide or polypeptide complex P₂-L₂-A₂-A₁-L₁-P₁—H₁ (Formula Ia) has weaker binding affinity for the tumor cell antigen that is at least 10× higher than the binding affinity for the tumor cell antigen of a form of the isolated polypeptide or polypeptide complex of Formula Ia that does not have P₁, L₁, P₂, or L₂. In some embodiments, the isolated polypeptide or polypeptide complex P₂-L₂-A₂-A₁-L₁-P₁-H₁ (Formula Ia) has weaker binding affinity for the tumor cell antigen that is at least 50× higher than the binding affinity for the tumor cell antigen of a form of the isolated polypeptide or polypeptide complex of Formula Ia that does not have P₁, L₁, P₂, or L₂. In some embodiments, the isolated polypeptide or polypeptide complex P₂-L₂-A₂-A₁-L₁-P₁-H₁ (Formula Ia) has weaker binding affinity for the tumor cell antigen that is at least 75× higher than the binding affinity for the tumor cell antigen of a form of the isolated polypeptide or polypeptide complex of Formula Ia that does not have P₁, L₁, P₂, or L₂. In some embodiments, the isolated polypeptide or polypeptide complex P₂-L₂-A₂-A₁-L₁-P₁-H₁(Formula Ia) has weaker binding affinity for the tumor cell antigen that is at least 100× higher than the binding affinity for the tumor cell antigen of a form of the isolated polypeptide or polypeptide complex of Formula Ia that does not have P₁, L₁, P₂, or L₂. In some embodiments, the isolated polypeptide or polypeptide complex P₂-L₂-A₂-A₁-L₁-P₁-H₁ (Formula Ia) has weaker binding affinity for the tumor cell antigen that is at least 120× higher than the binding affinity for the tumor cell antigen of a form of the isolated polypeptide or polypeptide complex of Formula Ia that does not have P₁, L₁, P₂, or L₂. In some embodiments, the isolated polypeptide or polypeptide complex P₂-L₂-A₂-A₁-L₁-P₁-H₁ (Formula Ia) has weaker binding affinity for the tumor cell antigen that is at least 200× higher than the binding affinity for the tumor cell antigen of a form of the isolated polypeptide or polypeptide complex of Formula Ia that does not have P₁, L₁, P₂, or L₂. In some embodiments, the isolated polypeptide or polypeptide complex P₂-L₂-A₂-A₁-L₁-P₁-H₁ (Formula Ia) has weaker binding affinity for the tumor cell antigen that is at least 300× higher than the binding affinity for the tumor cell antigen of a form of the isolated polypeptide or polypeptide complex of Formula Ia that does not have P₁, L₁, P₂, or L₂. In some embodiments, the isolated polypeptide or polypeptide complex P₂-L₂-A₂-A₁-L₁-P₁-H₁ (Formula Ia) has weaker binding affinity for the tumor cell antigen that is at least 400× higher than the binding affinity for the tumor cell antigen of a form of the isolated polypeptide or polypeptide complex of Formula Ia that does not have P₁, L₁, P₂, or L₂. In some embodiments, the isolated polypeptide or polypeptide complex P₂-L₂-A₂-A₁-L₁-P₁-H₁ (Formula Ia) has weaker binding affinity for the tumor cell antigen that is at least 500× higher than the binding affinity for the tumor cell antigen of a form of the isolated polypeptide or polypeptide complex of Formula Ia that does not have P₁, L₁, P₂, or L₂. In some embodiments, the isolated polypeptide or polypeptide complex P₂-L₂-A₂-A₁-L₁-P₁-H₁ (Formula Ia) has weaker binding affinity for the tumor cell antigen that is at least 600× higher than the binding affinity for the tumor cell antigen of a form of the isolated polypeptide or polypeptide complex of Formula Ia that does not have P₁, L₁, P₂, or L₂. In some embodiments, the isolated polypeptide or polypeptide complex P₂-L₂-A₂-A₁-L₁-P₁-H₁ (Formula Ia) has weaker binding affinity for the tumor cell antigen that is at least 700× higher than the binding affinity for the tumor cell antigen of a form of the isolated polypeptide or polypeptide complex of Formula Ia that does not have P₁, L₁, P₂, or L₂. In some embodiments, the isolated polypeptide or polypeptide complex P₂-L₂-A₂-A₁-L₁-P₁-H₁ (Formula Ia) has weaker binding affinity for the tumor cell antigen that is at least 800× higher than the binding affinity for the tumor cell antigen of a form of the isolated polypeptide or polypeptide complex of Formula Ia that does not have P₁, L₁, P₂, or L₂. In some embodiments, the isolated polypeptide or polypeptide complex P₂-L₂-A₂-A₁-L₁-P₁-H₁ (Formula Ia) has weaker binding affinity for the tumor cell antigen that is at least 900× higher than the binding affinity for the tumor cell antigen of a form of the isolated polypeptide or polypeptide complex of Formula Ia that does not have P₁, L₁, P₂, or L₂. In some embodiments, the isolated polypeptide or polypeptide complex P₂-L₂-A₂-A₁-L₁-P₁-H₁ (Formula Ia) has weaker binding affinity for the tumor cell antigen that is at least 1000× higher than the binding affinity for the tumor cell antigen of a form of the isolated polypeptide or polypeptide complex of Formula Ia that does not have P₁, L₁, P₂, or L₂. In some embodiments, the isolated polypeptide or polypeptide complex P₂-L₂-A₂-A₁-L₁-P₁-H₁ (Formula Ia) has weaker binding affinity for the tumor cell antigen that is at least 10,000× higher than the binding affinity for the tumor cell antigen of a form of the isolated polypeptide or polypeptide complex of Formula Ia that does not have P₁, L₁, P₂, or L₂.

[0101] In some embodiments, the isolated polypeptide or polypeptide complex P₂-L₂-A₂-A₁-L₁-P₁-H₁ (Formula Ia) has weaker binding affinity for the tumor cell antigen as compared to the binding affinity for the tumor cell antigen of the isolated polypeptide or polypeptide complex of Formula Ia in which L₁ and L₂ have been cleaved by the tumor specific proteases. In some embodiments, the isolated polypeptide or polypeptide complex P₂-L₂-A₂-A₁-L₁-P₁-H₁ (Formula Ia) has weaker binding affinity for the tumor cell antigen that is at least 10× higher than the binding affinity for the tumor cell antigen of the isolated polypeptide or polypeptide complex of Formula Ia in which L₁ and L₂ have been cleaved by the tumor specific proteases. In some embodiments, the isolated polypeptide or polypeptide complex P₂-L₂-A₂-A₁-L₁-P₁-H₁(Formula Ia) has weaker binding affinity for the tumor cell antigen that is at least 50× higher than the binding affinity for the tumor cell antigen of the isolated polypeptide or polypeptide complex of Formula Ia in which L₁ and L₂ have been cleaved by the tumor specific proteases. In some embodiments, the isolated polypeptide or polypeptide complex P₂-L₂-A₂-A₁-L₁-P₁-H₁ (Formula Ia) has weaker binding affinity for the tumor cell antigen that is at least 75× higher than the binding affinity for the tumor cell antigen of the isolated polypeptide or polypeptide complex of Formula Ia in which L₁ and L₂ have been cleaved by the tumor specific proteases. In some embodiments, the isolated polypeptide or polypeptide complex P₂-L₂-A₂-A₁-L₁-P₁-H₁(Formula Ia) has weaker binding affinity for the tumor cell antigen that is at least 100× higher than the binding affinity for the tumor cell antigen of the isolated polypeptide or polypeptide complex of Formula Ia in which L₁ and L₂ have been cleaved by the tumor specific proteases. In some embodiments, the isolated polypeptide or polypeptide complex P₂-L₂-A₂-A₁-L₁-P₁-H₁ (Formula Ia) has weaker binding affinity for the tumor cell antigen that is at least 120× higher than the binding affinity for the tumor cell antigen of the isolated polypeptide or polypeptide complex of Formula Ia in which L₁ and L₂ have been cleaved by the tumor specific proteases. In some embodiments, the isolated polypeptide or polypeptide complex P₂-L₂-A₂-A₁-L₁-P₁-H₁(Formula Ia) has weaker binding affinity for the tumor cell antigen that is at least 200× higher than the binding affinity for the tumor cell antigen of the isolated polypeptide or polypeptide complex of Formula Ia in which L₁ and L₂ have been cleaved by the tumor specific proteases. In some embodiments, the isolated polypeptide or polypeptide complex P₂-L₂-A₂-A₁-L₁-P₁-H₁ (Formula Ia) has weaker binding affinity for the tumor cell antigen that is at least 300× higher than the binding affinity for the tumor cell antigen of the isolated polypeptide or polypeptide complex of Formula Ia in which L₁ and L₂ have been cleaved by the tumor specific proteases. In some embodiments, the isolated polypeptide or polypeptide complex P₂-L₂-A₂-A₁-L₁-P₁-H₁(Formula Ia) has weaker binding affinity for the tumor cell antigen that is at least 400× higher than the binding affinity for the tumor cell antigen of the isolated polypeptide or polypeptide complex of Formula Ia in which L₁ and L₂ have been cleaved by the tumor specific proteases. In some embodiments, the isolated polypeptide or polypeptide complex P₂-L₂-A₂-A₁-L₁-P₁-H₁ (Formula Ia) has weaker binding affinity for the tumor cell antigen that is at least 500× higher than the binding affinity for the tumor cell antigen of the isolated polypeptide or polypeptide complex of Formula Ia in which L₁ and L₂ have been cleaved by the tumor specific proteases. In some embodiments, the isolated polypeptide or polypeptide complex P₂-L₂-A₂-A₁-L₁-P₁-H₁(Formula Ia) has weaker binding affinity for the tumor cell antigen that is at least 600× higher than the binding affinity for the tumor cell antigen of the isolated polypeptide or polypeptide complex of Formula Ia in which L₁ and L₂ have been cleaved by the tumor specific proteases. In some embodiments, the isolated polypeptide or polypeptide complex P₂-L₂-A₂-A₁-L₁-P₁-H₁ (Formula Ia) has weaker binding affinity for the tumor cell antigen that is at least 700× higher than the binding affinity for the tumor cell antigen of the isolated polypeptide or polypeptide complex of Formula Ia in which L₁ and L₂ have been cleaved by the tumor specific proteases. In some embodiments, the isolated polypeptide or polypeptide complex P₂-L₂-A₂-A₁-L₁-P₁-H₁(Formula Ia) has weaker binding affinity for the tumor cell antigen that is at least 800× higher than the binding affinity for the tumor cell antigen of the isolated polypeptide or polypeptide complex of Formula Ia in which L₁ and L₂ have been cleaved by the tumor specific proteases. In some embodiments, the isolated polypeptide or polypeptide complex P₂-L₂-A₂-A₁-L₁-P₁-H₁ (Formula Ia) has weaker binding affinity for the tumor cell antigen that is at least 900× higher than the binding affinity for the tumor cell antigen of the isolated polypeptide or polypeptide complex of Formula Ia in which L₁ and L₂ have been cleaved by the tumor specific proteases. In some embodiments, the isolated polypeptide or polypeptide complex P₂-L₂-A₂-A₁-L₁-P₁-H₁(Formula Ia) has weaker binding affinity for the tumor cell antigen that is at least 1000× higher than the binding affinity for the tumor cell antigen of the isolated polypeptide or polypeptide complex of Formula Ia in which L₁ and L₂ have been cleaved by the tumor specific proteases. In some embodiments, the isolated polypeptide or polypeptide complex P₂-L₂-A₂-A₁-L₁-P₁-H₁ (Formula Ia) has weaker binding affinity for the tumor cell antigen that is at least 10,000× higher than the binding affinity for the tumor cell antigen of the isolated polypeptide or polypeptide complex of Formula Ia in which L₁ and L₂ have been cleaved by the tumor specific proteases.

[0102] In some embodiments, the isolated polypeptide or polypeptide complex P₂-L₂-A₂-A₁-L₁-P₁-H₁ (Formula Ia) has an increased EC₅₀ in an IFNγ release T-cell activation assay as compared to the EC₅₀ in an IFNγ release T-cell activation assay of an isolated polypeptide or polypeptide complex of Formula Ia that does not have P₁, L₁, P₂, or L₂. In some embodiments, the isolated polypeptide or polypeptide complex P₂-L₂-A₂-A₁-L₁-P₁-H₁ (Formula Ia) has an increased EC₅₀ in an IFNγ release T-cell activation assay that is at least 10× higher than the EC₅₀ in an IFNγ release T-cell activation assay of a form of the isolated polypeptide or polypeptide complex of Formula Ia that does not have P₁, L₁, P₂, or L₂. In some embodiments, the isolated polypeptide or polypeptide complex P₂-L₂-A₂-A₁-L₁-P₁-H₁ (Formula Ia) has an increased EC₅₀ in an IFNγ release T-cell activation assay that is at least 50× higher than the EC₅₀ in an IFNγ release T-cell activation assay of a form of the isolated polypeptide or polypeptide complex of Formula Ia that does not have P₁, L₁, P₂, or L₂. In some embodiments, the isolated polypeptide or polypeptide complex P₂-L₂-A₂-A₁-L₁-P₁-H₁ (Formula Ia) has an increased EC₅₀ in an IFNγ release T-cell activation assay that is at least 75× higher than the EC₅₀ in an IFNγ release T-cell activation assay of a form of the isolated polypeptide or polypeptide complex of Formula Ia that does not have P₁, L₁, P₂, or L₂. In some embodiments, the isolated polypeptide or polypeptide complex P₂-L₂-A₂-A₁-L₁-P₁-H₁ (Formula Ia) has an increased EC₅₀ in an IFNγ release T-cell activation assay that is at least 100× higher than the EC₅₀ in an IFNγ release T-cell activation assay of a form of the isolated polypeptide or polypeptide complex of Formula Ia that does not have P1, L₁, P₂, or L₂. In some embodiments, the isolated polypeptide or polypeptide complex P₂-L₂-A₂-A₁-L₁-P₁-H₁ (Formula Ia) has an increased EC₅₀ in an IFNγ release T-cell activation assay that is at least 200× higher than the EC₅₀ in an IFNγ release T-cell activation assay of a form of the isolated polypeptide or polypeptide complex of Formula Ia that does not have P1, L₁, P₂, or L₂. In some embodiments, the isolated polypeptide or polypeptide complex P₂-L₂-A₂-A₁-L₁-P₁-H₁ (Formula Ia) has an increased EC₅₀ in an IFNγ release T-cell activation assay that is at least 300× higher than the EC₅₀ in an IFNγ release T-cell activation assay of a form of the isolated polypeptide or polypeptide complex of Formula Ia that does not have P1, L₁, P₂, or L₂. In some embodiments, the isolated polypeptide or polypeptide complex P₂-L₂-A₂-A₁-L₁-P₁-H₁ (Formula Ia) has an increased EC₅₀ in an IFNγ release T-cell activation assay that is at least 400× higher than the EC₅₀ in an IFNγ release T-cell activation assay of a form of the isolated polypeptide or polypeptide complex of Formula Ia that does not have P1, L₁, P₂, or L₂. In some embodiments, the isolated polypeptide or polypeptide complex P₂-L₂-A₂-A₁-L₁-P₁-H₁ (Formula Ia) has an increased EC₅₀ in an IFNγ release T-cell activation assay that is at least 500× higher than the EC₅₀ in an IFNγ release T-cell activation assay of a form of the isolated polypeptide or polypeptide complex of Formula Ia that does not have P1, L₁, P₂, or L₂. In some embodiments, the isolated polypeptide or polypeptide complex P₂-L₂-A₂-A₁-L₁-P₁-H₁ (Formula Ia) has an increased EC₅₀ in an IFNγ release T-cell activation assay that is at least 600× higher than the EC₅₀ in an IFNγ release T-cell activation assay of a form of the isolated polypeptide or polypeptide complex of Formula Ia that does not have P1, L₁, P₂, or L₂. In some embodiments, the isolated polypeptide or polypeptide complex P₂-L₂-A₂-A₁-L₁-P₁-H₁ (Formula Ia) has an increased EC₅₀ in an IFNγ release T-cell activation assay that is at least 700× higher than the EC₅₀ in an IFNγ release T-cell activation assay of a form of the isolated polypeptide or polypeptide complex of Formula Ia that does not P1, L₁, P₂, or L₂. In some embodiments, the isolated polypeptide or polypeptide complex P₂-L₂-A₂-A₁-L₁-P₁-H₁ (Formula Ia) has an increased EC₅₀ in an IFNγ release T-cell activation assay that is at least 800× higher than the EC₅₀ in an IFNγ release T-cell activation assay of a form of the isolated polypeptide or polypeptide complex of Formula Ia that does not have P₁, L₁, P₂, or L₂. In some embodiments, the isolated polypeptide or polypeptide complex P₂-L₂-A₂-A₁-L₁-P₁-H₁ (Formula Ia) has an increased EC₅₀ in an IFNγ release T-cell activation assay that is at least 900× higher than the EC₅₀ in an IFNγ release T-cell activation assay of a form of the isolated polypeptide or polypeptide complex of Formula Ia that does not have P1, L₁, P₂, or L₂. In some embodiments, the isolated polypeptide or polypeptide complex P₂-L₂-A₂-A₁-L₁-P₁-H₁ (Formula Ia) has an increased EC₅₀ in an IFNγ release T-cell activation assay that is at least 1000× higher than the EC₅₀ in an IFNγ release T-cell activation assay of a form of the isolated polypeptide or polypeptide complex of Formula Ia that does not have P₁, L₁, P₂, or L₂. In some embodiments, the isolated polypeptide or polypeptide complex P₂-L₂-A₂-A₁-L₁-P₁-H₁ (Formula Ia) has an increased EC₅₀ in an IFNγ release T-cell activation assay that is at least 10,000× higher than the EC₅₀ in an IFNγ release T-cell activation assay of a form of the isolated polypeptide or polypeptide complex of Formula Ia that does not have P1, L₁, P₂, or L₂.

[0103] In some embodiments, the isolated polypeptide or polypeptide complex P₂-L₂-A₂-A₁-L₁-P₁-H₁ (Formula Ia) has an increased EC₅₀ in a T-cell cytolysis assay as compared to the EC₅₀ in a T-cell cytolysis assay of the isolated polypeptide or polypeptide complex of Formula Ia in which L₁ and L₂ have been cleaved by the tumor specific proteases. In some embodiments, the isolated polypeptide or polypeptide complex P₂-L₂-A₂-A₁-L₁-P₁-H₁ (Formula Ia) has an increased EC₅₀ in a T-cell cytolysis assay that is at least 10× higher than the EC₅₀ in a T-cell cytolysis assay of the isolated polypeptide or polypeptide complex of Formula Ia in which L₁ and L₂ have been cleaved by the tumor specific proteases. In some embodiments, the isolated polypeptide or polypeptide complex P₂-L₂-A₂-A₁-L₁-P₁-H₁ (Formula Ia) has an increased EC₅₀ in a T-cell cytolysis assay that is at least 50× higher than the EC₅₀ in a T-cell cytolysis assay of the isolated polypeptide or polypeptide complex of Formula Ia in which L₁ and L₂ have been cleaved by the tumor specific proteases. In some embodiments, the isolated polypeptide or polypeptide complex P₂-L₂-A₂-A₁-L₁-P₁-H₁ (Formula Ia) has an increased EC₅₀ in a T-cell cytolysis assay that is at least 75× higher than the EC₅₀ in a T-cell cytolysis assay of the isolated polypeptide or polypeptide complex of Formula Ia in which L₁ and L₂ have been cleaved by the tumor specific proteases. In some embodiments, the isolated polypeptide or polypeptide complex P₂-L₂-A₂-A₁-L₁-P₁-H₁ (Formula Ia) has an increased EC₅₀ in a T-cell cytolysis assay that is at least 100× higher than the EC₅₀ in a T-cell cytolysis assay of the isolated polypeptide or polypeptide complex of Formula Ia in which L₁ and L₂ have been cleaved by the tumor specific proteases. In some embodiments, the isolated polypeptide or polypeptide complex P₂-L₂-A₂-A₁-L₁-P₁-H₁ (Formula Ia) has an increased EC₅₀ in a T-cell cytolysis assay that is at least 200× higher than the EC₅₀ in a T-cell cytolysis assay of the isolated polypeptide or polypeptide complex of Formula Ia in which L₁ and L₂ have been cleaved by the tumor specific proteases. In some embodiments, the isolated polypeptide or polypeptide complex P₂-L₂-A₂-A₁-L₁-P₁-H₁ (Formula Ia) has an increased EC₅₀ in a T-cell cytolysis assay that is at least 300× higher than the EC₅₀ in a T-cell cytolysis assay of the isolated polypeptide or polypeptide complex of Formula Ia in which L₁ and L₂ have been cleaved by the tumor specific proteases. In some embodiments, the isolated polypeptide or polypeptide complex P₂-L₂-A₂-A₁-L₁-P₁-H₁ (Formula Ia) has an increased EC₅₀ in a T-cell cytolysis assay that is at least 400× higher than the EC₅₀ in a T-cell cytolysis assay of the isolated polypeptide or polypeptide complex of Formula Ia in which L₁ and L₂ have been cleaved by the tumor specific proteases. In some embodiments, the isolated polypeptide or polypeptide complex P₂-L₂-A₂-A₁-L₁-P₁-H₁ (Formula Ia) has an increased EC₅₀ in a T-cell cytolysis assay that is at least 500× higher than the EC₅₀ in a T-cell cytolysis assay of the isolated polypeptide or polypeptide complex of Formula Ia in which L₁ and L₂ have been cleaved by the tumor specific proteases. In some embodiments, the isolated polypeptide or polypeptide complex P₂-L₂-A₂-A₁-L₁-P₁-H₁ (Formula Ia) has an increased EC₅₀ in a T-cell cytolysis assay that is at least 600× higher than the EC₅₀ in a T-cell cytolysis assay of the isolated polypeptide or polypeptide complex of Formula Ia in which L₁ and L₂ have been cleaved by the tumor specific proteases. In some embodiments, the isolated polypeptide or polypeptide complex P₂-L₂-A₂-A₁-L₁-P₁-H₁ (Formula Ia) has an increased EC₅₀ in a T-cell cytolysis assay that is at least 700× higher than the EC₅₀ in a T-cell cytolysis assay of the isolated polypeptide or polypeptide complex of Formula Ia in which L₁ and L₂ have been cleaved by the tumor specific proteases. In some embodiments, the isolated polypeptide or polypeptide complex P₂-L₂-A₂-A₁-L₁-P₁-H₁ (Formula Ia) has an increased EC₅₀ in a T-cell cytolysis assay that is at least 800× higher than the EC₅₀ in a T-cell cytolysis assay of the isolated polypeptide or polypeptide complex of Formula Ia in which L₁ and L₂ have been cleaved by the tumor specific proteases. In some embodiments, the isolated polypeptide or polypeptide complex P₂-L₂-A₂-A₁-L₁-P₁-H₁ (Formula Ia) has an increased EC₅₀ in a T-cell cytolysis assay that is at least 900× higher than the EC₅₀ in a T-cell cytolysis assay of the isolated polypeptide or polypeptide complex of Formula Ia in which L₁ and L₂ have been cleaved by the tumor specific proteases. In some embodiments, the isolated polypeptide or polypeptide complex P₂-L₂-A₂-A₁-L₁-P₁-H₁ (Formula Ia) has an increased EC₅₀ in a T-cell cytolysis assay that is at least 1000× higher than the EC₅₀ in a T-cell cytolysis assay of the isolated polypeptide or polypeptide complex of Formula Ia in which L₁ and L₂ have been cleaved by the tumor specific proteases. In some embodiments, the isolated polypeptide or polypeptide complex P₂-L₂-A₂-A₁-L₁-P₁-H₁ (Formula Ia) has an increased EC₅₀ in a T-cell cytolysis assay that is at least 10,000× higher than the EC₅₀ in a T-cell cytolysis assay of the isolated polypeptide or polypeptide complex of Formula Ia in which L₁ and L₂ have been cleaved by the tumor specific proteases.

[0104] In some embodiments, the isolated polypeptide or polypeptide complex P₂-L₂-A₂-A₁-L₁-P₁-H₁ (Formula Ia) has an increased EC₅₀ in a T-cell cytolysis assay as compared to the EC₅₀ in a T-cell cytolysis assay of an isolated polypeptide or polypeptide complex that does not have P1, L₁, P₂, or L₂. In some embodiments, the isolated polypeptide or polypeptide complex P₂-L₂-A₂-A₁-L₁-P₁-H₁ (Formula Ia) has an increased EC₅₀ in a T-cell cytolysis assay that is at least 10× higher than the EC₅₀ in a T-cell cytolysis assay of a form of the isolated polypeptide or polypeptide complex of Formula Ia that does not have P₁, L₁, P₂, or L₂. In some embodiments, the isolated polypeptide or polypeptide complex P₂-L₂-A₂-A₁-L₁-P₁-H₁ (Formula Ia) has an increased EC₅₀ in a T-cell cytolysis assay that is at least 50× higher than the EC₅₀ in a T-cell cytolysis assay of a form of the isolated polypeptide or polypeptide complex of Formula Ia that does not have P1, L₁, P₂, or L₂. In some embodiments, the isolated polypeptide or polypeptide complex P₂-L₂-A₂-A₁-L₁-P₁-H₁ (Formula Ia) has an increased EC₅₀ in a T-cell cytolysis assay that is at least 75× higher than the EC₅₀ in a T-cell cytolysis assay of a form of the isolated polypeptide or polypeptide complex of Formula Ia that does not have P1, L₁, P₂, or L₂. In some embodiments, the isolated polypeptide or polypeptide complex P₂-L₂-A₂-A₁-L₁-P₁-H₁ (Formula Ia) has an increased EC₅₀ in a T-cell cytolysis assay that is at least 100× higher than the EC₅₀ in a T-cell cytolysis assay of an isolated polypeptide or polypeptide complex that does not have P1, L₁, P₂, or L₂. In some embodiments, the isolated polypeptide or polypeptide complex P₂-L₂-A₂-A₁-L₁-P₁-H₁ (Formula Ia) has an increased EC₅₀ in a T-cell cytolysis assay that is at least 200× higher than the EC₅₀ in a T-cell cytolysis assay of an isolated polypeptide or polypeptide complex that does not have Pi, L₁, P₂, or L₂. In some embodiments, the isolated polypeptide or polypeptide complex P₂-L₂-A₂-A₁-L₁-P₁-H₁ (Formula Ia) has an increased EC₅₀ in a T-cell cytolysis assay that is at least 300× higher than the EC₅₀ in a T-cell cytolysis assay of an isolated polypeptide or polypeptide complex that does not have P₁, L₁, P₂, or L₂. In some embodiments, the isolated polypeptide or polypeptide complex P₂-L₂-A₂-A₁-L₁-P₁-H₁ (Formula Ia) has an increased EC₅₀ in a T-cell cytolysis assay that is at least 400× higher than the EC₅₀ in a T-cell cytolysis assay of an isolated polypeptide or polypeptide complex that does not have P₁, L₁, P₂, or L₂. In some embodiments, the isolated polypeptide or polypeptide complex P₂-L₂-A₂-A₁-L₁-P₁-H₁ (Formula Ia) has an increased EC₅₀ in a T-cell cytolysis assay that is at least 500× higher than the EC₅₀ in a T-cell cytolysis assay of an isolated polypeptide or polypeptide complex that does not have P₁, L₁, P₂, or L₂. In some embodiments, the isolated polypeptide or polypeptide complex P₂-L₂-A₂-A₁-L₁-P₁-H₁ (Formula Ia) has an increased EC₅₀ in a T-cell cytolysis assay that is at least 600× higher than the EC₅₀ in a T-cell cytolysis assay of an isolated polypeptide or polypeptide complex that does not have P₁, L₁, P₂, or L₂. In some embodiments, the isolated polypeptide or polypeptide complex P₂-L₂-A₂-A₁-L₁-P₁-H₁ (Formula Ia) has an increased EC₅₀ in a T-cell cytolysis assay that is at least 700× higher than the EC₅₀ in a T-cell cytolysis assay of an isolated polypeptide or polypeptide complex that does not have P₁, L₁, P₂, or L₂. In some embodiments, the isolated polypeptide or polypeptide complex P₂-L₂-A₂-A₁-L₁-P₁-H₁ (Formula Ia) has an increased EC₅₀ in a T-cell cytolysis assay that is at least 800× higher than the EC₅₀ in a T-cell cytolysis assay of an isolated polypeptide or polypeptide complex that does not have P₁, L₁, P₂, or L₂. In some embodiments, the isolated polypeptide or polypeptide complex P₂-L₂-A₂-A₁-L₁-P₁-H₁ (Formula Ia) has an increased EC₅₀ in a T-cell cytolysis assay that is at least 900× higher than the EC₅₀ in a T-cell cytolysis assay of an isolated polypeptide or polypeptide complex that does not have P₁, L₁, P₂, or L₂. In some embodiments, the isolated polypeptide or polypeptide complex P₂-L₂-A₂-A₁-L₁-P₁-H₁ (Formula Ia) has an increased EC₅₀ in a T-cell cytolysis assay that is at least 1000× higher than the EC₅₀ in a T-cell cytolysis assay of an isolated polypeptide or polypeptide complex that does not have P₁, L₁, P₂, or L₂. In some embodiments, the isolated polypeptide or polypeptide complex P₂-L₂-A₂-A₁-L₁-P₁-H₁ (Formula Ia) has an increased EC₅₀ in a T-cell cytolysis assay that is at least 10,000× higher than the EC₅₀ in a T-cell cytolysis assay of an isolated polypeptide or polypeptide complex that does not have P₁, L₁, P₂, or L₂.

[0105] In some embodiments, the isolated polypeptide or polypeptide complex P₂-L₂-A₂-A₁-L₁-P₁-H₁ (Formula Ia) has an increased EC₅₀ in a T-cell cytolysis assay as compared to the EC₅₀ in a T-cell cytolysis assay of the isolated polypeptide or polypeptide complex of Formula Ia in which L₁ and L₂ have been cleaved by the tumor specific proteases. In some embodiments, the isolated polypeptide or polypeptide complex P₂-L₂-A₂-A₁-L₁-P₁-H₁ (Formula Ia) has an increased EC₅₀ in a T-cell cytolysis assay that is at least 10× higher than the EC₅₀ in a T-cell cytolysis assay of the isolated polypeptide or polypeptide complex of Formula Ia in which L₁ and L₂ have been cleaved by the tumor specific proteases. In some embodiments, the isolated polypeptide or polypeptide complex P₂-L₂-A₂-A₁-L₁-P₁-H₁ (Formula Ia) has an increased EC₅₀ in a T-cell cytolysis assay that is at least 50× higher than the EC₅₀ in a T-cell cytolysis assay of the isolated polypeptide or polypeptide complex of Formula Ia in which L₁ and L₂ have been cleaved by the tumor specific proteases. In some embodiments, the isolated polypeptide or polypeptide complex P₂-L₂-A₂-A₁-L₁-P₁-H₁ (Formula Ia) has an increased EC₅₀ in a T-cell cytolysis assay that is at least 75× higher than the EC₅₀ in a T-cell cytolysis assay of the isolated polypeptide or polypeptide complex of Formula Ia in which L₁ and L₂ have been cleaved by the tumor specific proteases. In some embodiments, the isolated polypeptide or polypeptide complex P₂-L₂-A₂-A₁-L₁-P₁-H₁ (Formula Ia) has an increased EC₅₀ in a T-cell cytolysis assay that is at least 100× higher than the EC₅₀ in a T-cell cytolysis assay of the isolated polypeptide or polypeptide complex of Formula Ia in which L₁ and L₂ have been cleaved by the tumor specific proteases. In some embodiments, the isolated polypeptide or polypeptide complex P₂-L₂-A₂-A₁-L₁-P₁-H₁ (Formula Ia) has an increased EC₅₀ in a T-cell cytolysis assay that is at least 200× higher than the EC₅₀ in a T-cell cytolysis assay of the isolated polypeptide or polypeptide complex of Formula Ia in which L₁ and L₂ have been cleaved by the tumor specific proteases. In some embodiments, the isolated polypeptide or polypeptide complex P₂-L₂-A₂-A₁-L₁-P₁-H₁ (Formula Ia) has an increased EC₅₀ in a T-cell cytolysis assay that is at least 300× higher than the EC₅₀ in a T-cell cytolysis assay of the isolated polypeptide or polypeptide complex of Formula Ia in which L₁ and L₂ have been cleaved by the tumor specific proteases. In some embodiments, the isolated polypeptide or polypeptide complex P₂-L₂-A₂-A₁-L₁-P₁-H₁ (Formula Ia) has an increased EC₅₀ in a T-cell cytolysis assay that is at least 400× higher than the EC₅₀ in a T-cell cytolysis assay of the isolated polypeptide or polypeptide complex of Formula Ia in which L₁ and L₂ have been cleaved by the tumor specific proteases. In some embodiments, the isolated polypeptide or polypeptide complex P₂-L₂-A₂-A₁-L₁-P₁-H₁ (Formula Ia) has an increased EC₅₀ in a T-cell cytolysis assay that is at least 500× higher than the EC₅₀ in a T-cell cytolysis assay of the isolated polypeptide or polypeptide complex of Formula Ia in which L₁ and L₂ have been cleaved by the tumor specific proteases. In some embodiments, the isolated polypeptide or polypeptide complex P₂-L₂-A₂-A₁-L₁-P₁-H₁ (Formula Ia) has an increased EC₅₀ in a T-cell cytolysis assay that is at least 600× higher than the EC₅₀ in a T-cell cytolysis assay of the isolated polypeptide or polypeptide complex of Formula Ia in which L₁ and L₂ have been cleaved by the tumor specific proteases. In some embodiments, the isolated polypeptide or polypeptide complex P₂-L₂-A₂-A₁-L₁-P₁-H₁ (Formula Ia) has an increased EC₅₀ in a T-cell cytolysis assay that is at least 700× higher than the EC₅₀ in a T-cell cytolysis assay of the isolated polypeptide or polypeptide complex of Formula Ia in which L₁ and L₂ have been cleaved by the tumor specific proteases. In some embodiments, the isolated polypeptide or polypeptide complex P₂-L₂-A₂-A₁-L₁-P₁-H₁ (Formula Ia) has an increased EC₅₀ in a T-cell cytolysis assay that is at least 800× higher than the EC₅₀ in a T-cell cytolysis assay of the isolated polypeptide or polypeptide complex of Formula Ia in which L₁ and L₂ have been cleaved by the tumor specific proteases. In some embodiments, the isolated polypeptide or polypeptide complex P₂-L₂-A₂-A₁-L₁-P₁-H₁ (Formula Ia) has an increased EC₅₀ in a T-cell cytolysis assay that is at least 900× higher than the EC₅₀ in a T-cell cytolysis assay of the isolated polypeptide or polypeptide complex of Formula Ia in which L₁ and L₂ have been cleaved by the tumor specific proteases. In some embodiments, the isolated polypeptide or polypeptide complex P₂-L₂-A₂-A₁-L₁-P₁-H₁ (Formula Ia) has an increased EC₅₀ in a T-cell cytolysis assay that is at least 1000× higher than the EC₅₀ in a T-cell cytolysis assay of the isolated polypeptide or polypeptide complex of Formula Ia in which L₁ and L₂ have been cleaved by the tumor specific proteases. In some embodiments, the isolated polypeptide or polypeptide complex P₂-L₂-A₂-A₁-L₁-P₁-H₁ (Formula Ia) has an increased EC₅₀ in a T-cell cytolysis assay that is at least 10,000× higher than the EC₅₀ in a T-cell cytolysis assay of the isolated polypeptide or polypeptide complex of Formula Ia in which L₁ and L₂ have been cleaved by the tumor specific proteases.

### Second Antigen Recognizing Molecule (A₂)

[0106] In some embodiments, A₂ comprises an antibody or antibody fragment. In some embodiments, the antibody or antibody fragment thereof comprises a single chain variable fragment, a single domain antibody, a Fab, or a Fab′. In some embodiments, the antibody or antibody fragment thereof comprises a single chain variable fragment (scFv), a heavy chain variable domain (VH domain), a light chain variable domain (VL domain), a variable domain (VHH) of a camelid derived single domain antibody. In some embodiments, the antibody or antibody fragment thereof is humanized or human. In some embodiments, A₂ is the Fab or Fab′. In some embodiments, the Fab or Fab′ comprises (a) a Fab light chain polypeptide and (b) a Fab heavy chain polypeptide. In some embodiments, the antibody or antibody fragment thereof comprises a TROP2 binding domain.

[0107] In some embodiments, the antigen binding fragment (Fab) or Fab′ that binds to TROP2 comprises a Fab light chain polypeptide chain and a Fab heavy chain polypeptide. In some embodiments, the Fab light chain polypeptide comprises a Fab light chain variable domain. In some embodiments, the Fab heavy chain polypeptide comprises a Fab heavy chain variable domain. In some embodiments, the Fab heavy chain variable domain comprises at least one, two, or three complementarity determining regions (CDR)s disclosed in Table 2 or a sequence substantially identical thereto (e.g., a sequence that has at least 90%, 95%, 96%, 97%, 98%, or 99% sequence identity). In some embodiments, the Fab light chain variable domain comprises at least one, two, or three complementarity determining regions (CDR)s disclosed in Table 2 or a sequence substantially identical thereto (e.g., a sequence that has at least 90%, 95%, 96%, 97%, 98%, or 99% sequence identity).

[0108] In some embodiments, the Fab heavy chain variable domain comprises at least one, two, or three complementarity determining regions (CDR)s disclosed in Table 2 or a sequence substantially identical thereto (e.g., a sequence that has at least 90%, 95%, 96%, 97%, 98%, or 99% sequence identity); and the Fab light chain variable domain comprises at least one, two, or three complementarity determining regions (CDR)s disclosed in Table 2 or a sequence substantially identical thereto (e.g., a sequence that has at least 90%, 95%, 96%, 97%, 98%, or 99% sequence identity).

TABLE 2
anti-TROP2 amino acid sequences (CDRs as determined by IMGT numbering system)

| | Amino Acid Sequence | SEQ ID |
|---|---|---|
| Construct Description | (N to C) | NO: |
| TROP2: HC: CDR1 | GYTFTNYG | 15 |
| TROP2: HC: CDR2 | INTYTGEP | 16 |
| TROP2: HC: CDR3 | ARGGFGSSYWYFDV | 17 |
| TROP2: LC: CDR1 | QDVSIA | 18 |
| TROP2: LC: CDR2 | SAS | 19 |
| TROP2: LC: CDR3 | QQHYITPLT | 20 |
| TROP2 Fab LC | DIQLTQSPSSLSASVGDRVSITCKA | 21 |
| | SQDVSIAVAWYQQKPGKAPKLLI | |
| | YSASYRYTGVPDRFSGSGSGTDFT | |
| | LTISSLQPEDFAVYYCQQHYITPL | |
| | TFGAGTKVEIKRTVAAPSVFIFPPS | |
| | DEQLKSGTASVVCLLNNFYPREA | |
| | KVQWKVDNALQSGNSQESVTEQ | |
| | DSKDSTYSLSSTLTLSKADYEKHK | |
| | VYACEVTHQGLSSPVTKSFNRGE | |
| | C | |
| TROP2 Fab HC | QVQLQQSGSELKKPGASVKVSCK | 22 |
| | ASGYTFTNYGMNWVKQAPGQG | |
| | LKWMGWINTYTGEPTYTDDFKG | |
| | RFAFSLDTSVSTAYLQISSLKADD | |
| | TAVYFCARGGFGSSYWYFDVW | |
| | GQGSLVTVSSASTKGPSVFPLAPS | |
| | SKSTSGGTAALGCLVKDYFPEPV | |
| | TVSWNSGALTSGVHTFPAVLQSS | |
| | GLYSLSSVVTVPSSSLGTQTYICN | |
| | VNHKPSNTKVDKKVEPKSC | |

[0109] In some embodiments, the Fab comprises complementarity determining regions (CDRs): HC-CDR1, HC-CDR2, and HC-CDR3, wherein the HC-CDR1, the HC-CDR2, and the HC-CDR3 of the Fab comprise: HC-CDR11: SEQ ID NO: 15, HC-CDR2: SEQ ID NO: 16, and HC-CDR3: SEQ ID NO: 17; and the Fab comprises CDRs: LC-CDR1, LC-CDR2, and LC-CDR3, wherein the LC-CDR1, the LC-CDR2, and the LC-CDR3 of the Fab comprise LC-CDR1: SEQ ID NO: 18, LC-CDR2: SEQ ID NO: 19, and LC-CDR3: SEQ ID NO: 20. In some embodiments, the Fab comprises complementarity determining regions (CDRs): HC-CDR1, HC-CDR2, and HC-CDR3, wherein the HC-CDR1, the HC-CDR2, and the HC-CDR3 of the Fab comprise: HC-CDR1: SEQ ID NO: 15, HC-CDR2: SEQ ID NO: 16, and HC-CDR3: SEQ ID NO: 17 and wherein the CDRs comprise from 0-2 amino acid modifications in at least one of the HC-CDR1, HC-CDR2, or HC-CDR3; and the Fab comprises CDRs: LC-CDR1, LC-CDR2, and LC-CDR3, wherein the LC-CDR1, the LC-CDR2, and the LC-CDR3 of the Fab comprise LC-CDR11: SEQ ID NO: 18, LC-CDR2: SEQ ID NO: 19, and LC-CDR3: SEQ ID NO: 20 and wherein the CDRs comprise from 0-2 amino acid modifications in at least one of the LC-CDR1, LC-CDR2, or LC-CDR3.

[0110] In some embodiments, A₂ comprises complementarity determining regions (CDRs): HC-CDR1, HC-CDR2, and HC-CDR3, wherein the HC-CDR1, the HC-CDR2, and the HC-CDR3 of A₂ comprise: HC-CDR1: SEQ ID NO: 15, HC-CDR2: SEQ ID NO: 16, and HC-CDR3: SEQ ID NO: 17; and A₂ comprises CDRs: LC-CDR1, LC-CDR2, and LC-CDR3, wherein the LC-CDR1, the LC-CDR2, and the LC-CDR3 of A₂ comprise LC-CDR1: SEQ ID NO: 18, LC-CDR2: SEQ ID NO: 19, and LC-CDR3: SEQ ID NO: 20.

[0111] In some embodiments, the Fab light chain polypeptide comprises an amino acid sequence according to SEQ ID NO: 21. In some embodiments, the Fab light chain polypeptide comprises an amino acid sequence that has at least 80% sequence identity according to SEQ ID NO: 21. In some embodiments, the Fab light chain polypeptide comprises an amino acid sequence that has at least 85% sequence identity according to SEQ ID NO: 21. In some embodiments, the Fab light chain polypeptide comprises an amino acid sequence that has at least 90% sequence identity according to SEQ ID NO: 21. In some embodiments, the Fab light chain polypeptide comprises an amino acid sequence that has at least 95% sequence identity according to SEQ ID NO: 21. In some embodiments, the Fab light chain polypeptide comprises an amino acid sequence that has at least 99% sequence identity according to SEQ ID NO: 21.

[0112] In some embodiments, the Fab heavy chain polypeptide comprises an amino acid sequence according to SEQ ID NO: 22. In some embodiments, the Fab heavy chain polypeptide comprises an amino acid sequence that has at least 80% sequence identity according to SEQ ID NO: 22. In some embodiments, the Fab heavy chain polypeptide comprises an amino acid sequence that has at least 85% sequence identity according to SEQ ID NO: 22. In some embodiments, the Fab heavy chain polypeptide comprises an amino acid sequence that has at least 90% sequence identity according to SEQ ID NO: 22. In some embodiments, the Fab heavy chain polypeptide comprises an amino acid sequence that has at least 95% sequence identity according to SEQ ID NO: 22. In some embodiments, the Fab heavy chain polypeptide comprises an amino acid sequence that has at least 99% sequence identity according to SEQ ID NO: 22.

[0113] In some embodiments, the Fab light chain polypeptide of A₂ is bound to a C-terminus of the single chain variable fragment (scFv) of A₁. In some embodiments, the Fab heavy chain polypeptide of A₂ is bound to a C-terminus of the single chain variable fragment (scFv) A₁. In some embodiments, the Fab light chain polypeptide of A₂ is bound to a N-terminus of the single chain variable fragment (scFv) of A₁. In some embodiments, the Fab heavy chain polypeptide of A₂ is bound to a N-terminus of the single chain variable fragment (scFv) A₁. In some embodiments, the Fab heavy chain polypeptide of A₂ is bound to the scFv heavy chain polypeptide of A₁. In some embodiments, Fab light chain polypeptide of A₂ is bound to the scFv heavy chain polypeptide of A₁. In some embodiments, the Fab heavy chain polypeptide of A₂ is bound to the scFv light chain polypeptide of A₁. In some embodiments, the Fab light chain polypeptide of A₂ is bound to the scFv light chain polypeptide of A₁.

[0114] In some embodiments, A₂ further comprises P₂ and L₂, wherein P₂ comprises a peptide that binds to A₂; and L₂ comprises a linking moiety that connects A₂ to P₂ and is a substrate for a tumor specific protease. In some embodiments, the Fab heavy chain polypeptide of A₂ is bound to the scFv heavy chain polypeptide of A₁ and L₂ is bound to the Fab light chain polypeptide of A₂. In some embodiments, the Fab light chain polypeptide of A₂ is bound to the scFv heavy chain polypeptide of A₁ and L₂ is bound to the Fab heavy chain polypeptide of A₂. In some embodiments, the Fab heavy chain polypeptide of A₂ is bound to the scFv light chain polypeptide of A₁ and L₂ is bound to the Fab light chain polypeptide of A₂. In some embodiments, the Fab light chain polypeptide of A₂ is bound to the scFv light chain polypeptide of A₁ and L₂ is bound to the Fab heavy chain polypeptide of A₂.

[0115] In some embodiments, the Fab heavy chain polypeptide of A₂ is bound to the scFv heavy chain polypeptide of A₁ and L₂ is bound to the Fab light chain polypeptide of A₂. In some embodiments, the Fab light chain polypeptide of A₂ is bound to the scFv heavy chain polypeptide of A₁ and L₂ is bound to the Fab heavy chain polypeptide of A₂. In some embodiments, the Fab heavy chain polypeptide of A₂ is bound to the scFv light chain polypeptide of A₁ and L₂ is bound to the Fab light chain polypeptide of A₂. In some embodiments, the Fab light chain polypeptide of A₂ is bound to the scFv light chain polypeptide of A₁ and L₂ is bound to the Fab heavy chain polypeptide of A₂.

Peptide (P₁ and P₂ and P₁ₐ)

[0116] In some embodiments, P₁, P₂, or P₁ₐ comprises a sequence as disclosed in Table 3 or a sequence substantially identical thereto (e.g., a sequence that has 0, 1, or 2 amino acid modifications).

TABLE 3
P₁ and P₂ and P₁ₐ Sequences

| | | SEQ |
|---|---|---|
| | Amino Acid | ID |
| Construct Description | Sequence (N to C) | NO: |
| TROP2 Fab Peptide-1 | SVLFCVKNLYCWVT | 23 |
| TROP2 Fab Peptide-2 | VDFCKIYSWPVCHQ | 24 |
| TROP2 Fab Peptide-3 | IDFCMLYNWPICAG | 25 |
| SP34.185 scFv Peptide-A | GSQCLGPEWEVCPY | 26 |
| SP34.185 scFv Peptide-B | VYCGPEFDESVGCM | 27 |
| SP34.194 scFv Peptide-AM | GYLWGCEWNCAGITT | 122 |

[0117] In some embodiments, P₁ impairs binding of A₁ to a first target antigen. In some embodiments, P₁ impairs binding of A₁ to the effector cell antigen. In some embodiments, P₁ is bound to A₁ through ionic interactions, electrostatic interactions, hydrophobic interactions, Pi-stacking interactions, and H-bonding interactions, or a combination thereof. In some embodiments, P₁ is bound to A₁ at or near an antigen binding site. In some embodiments, P₁ becomes unbound from A₁ when L₁ is cleaved by the tumor specific protease thereby exposing A₁ to the effector cell antigen. In some embodiments, the protease comprises a matrix metalloprotease (MMP) or a serine protease. In some embodiments, the matrix metalloprotease comprises MMP2, MMP7, MMP9, MMP13, or MMP14. In some embodiments, the serine protease comprises matriptase (MTSP1), urokinase, or hepsin. In some embodiments, P₁ has less than 70% sequence identity to the effector cell antigen. In some embodiments, P₁ has less than 75% sequence identity to the effector cell antigen. In some embodiments, P₁ has less than 80% sequence identity to the effector cell antigen. In some embodiments, P₁ has less than 85% sequence identity to the effector cell antigen. In some embodiments, P₁ has less than 90% sequence identity to the effector cell antigen. In some embodiments, P₁ has less than 95% sequence identity to the effector cell antigen. In some embodiments, P₁ has less than 98% sequence identity to the effector cell antigen. In some embodiments, P₁ has less than 99% sequence identity to the effector cell antigen. In some embodiments, P₁ comprises a de novo amino acid sequence that shares less than 10% sequence identity to the effector cell antigen. In some embodiments, P₁ comprises an amino acid sequence according to SEQ ID NO: 26 or 27. In some embodiments, P₁ comprises the amino acid sequence of SEQ ID NO: 26. In some embodiments, P₁ comprises the amino acid sequence of SEQ ID NO: 27. In some embodiments, P₁ comprises the amino acid sequence of SEQ ID NO: 122.

[0118] In some embodiments, P₁ comprises an amino acid sequence according to Z₁-Z₂-C-Z₄-P-Z₆-Z₇-Z₈-Z₉-Z₁₀-Z₁₁-Z₁₂-C-Z₁₄ and Z₁ is selected from D, Y, F, I, N, V, H, L, A, T, S, and P; Z₂ is selected from D, Y, L, F, I, N, A, V, H, T, and S; Z₄ is selected from G and W; Z₆ is selected from E, D, V, and P; Z₇ is selected from W, L, F, V, G, M, I, and Y; Z₈ is selected from E, D, P, and Q; Z₉ is selected from E, D, Y, V, F, W, P, L, and Q; Z₁₀ is selected from S, D, Y, T, I, F, V, N, A, P, L, and H; Z₁₁ is selected from I, Y, F, V, L, T, N, S, D, A, and H; Z₁₂ is selected from F, D, Y, L, I, V, A, N, T, P, S, and H; and Z₁₄ is selected from D, Y, N, F, I, P, V, A, T, H, L and S. In some embodiments, Z₁ is selected from D, Y, F, I, and N; Z₂ is selected from D, Y, L, F, I, and N; Z₄ is selected from G and W; Z₆ is selected from E and D; Z₇ is selected from W, L, F, and V; Z₈ is selected from E and D; Z₉ is selected from E, D, Y, and V; Z₁₀ is selected from S, D, Y, T, and I; Z₁ is selected from I, Y, F, V, L, and T; Z₁₂ is selected from F, D, Y, L, I, V, A, and N; and Z₁₄ is selected from D, Y, N, F, I, and P. In some embodiments, Z₁ is selected from D, Y, and F; Z₂ is selected from D, Y, L, and F; Z₄ is selected from G and W; Z₆ is selected from E and D; Z₇ is selected from W, L, and F; Z₈ is selected from E and D; Z₉ is selected from E and D; Z₁₀ is selected from S, D, and Y; Z₁ is selected from I, Y, and F; Z₁₂ is selected from F, D, Y, and L; and Z₁₄ is selected from D, Y, and N.

[0119] In some embodiments, P₁ comprises an amino acid sequence according to U₁-U₂-C-U₄-P-U₆-U₇-U₈-U₉-U₁₀-U₁₁-U₁₂-C-U₁₄ and U₁ is selected from D, Y, F, I, N, V, H, L, A, T, S, and P; U₂ is selected from D, Y, L, F, I, N, A, V, H, T, and S; U₄ is selected from G and W; U₆ is selected from E, D, V, and P; U₇ is selected from W, L, F, V, G, M, I, and Y; U₈ is selected from E, D, P, and Q; U₉ is selected from E, D, Y, V, F, W, P, L, and Q; U₁₀ is selected from S, D, Y, T, I, F, V, N, A, P, L, and H; U₁₁ is selected from I, Y, F, V, L, T, N, S, D, A, and H; U₁₂ is selected from F, D, Y, L, I, V, A, N, T, P, S, G, and H; and U₁₄ is selected from D, Y, N, F, I, P, V, A, T, H, L, M, and S. In some embodiments, U₁ is selected from D, Y, F, I, V, and N; U₂ is selected from D, Y, L, F, I, and N; U₄ is selected from G and W; U₆ is selected from E and D; U₇ is selected from W, L, F, G, and V; U₈ is selected from E and D; U₉ is selected from E, D, Y, and V; U₁₀ is selected from S, D, Y, T, and I; U₁₁ is selected from I, Y, F, V, L, and T; U₁₂ is selected from F, D, Y, L, I, V, A, G, and N; and U₁₄ is selected from D, Y, N, F, I, M, and P. In some embodiments, U₁ is selected from D, Y, V, and F; U₂ is selected from D, Y, L, and F; U₄ is selected from G and W; U₆ is selected from E and D; U₇ is selected from W, L, G, and F; U₈ is selected from E and D; U₉ is selected from E and D; U₁₀ is selected from S, D, T, and Y; U₁₁ is selected from I, Y, V, L, and F; U₁₂ is selected from F, D, Y, G, A, and L; and U₁₄ is selected from D, Y, M, and N.

[0120] In some embodiments, P₁ comprises the amino acid sequences according to SEQ ID NOs: 202-228.

[0121] In some embodiments, P₁ comprises an amino acid sequences according to any of the sequences of Table 35.

[0122] In some embodiments, P₁ comprises the amino acid sequences according to SEQ ID NOs: 229-240.

[0123] In some embodiments, P₁ comprises the amino acid sequence according to SEQ ID NO: 239 or a peptide sequence that has 1, 2, or 3, amino acid substitutions, additions, or deletions relative to the amino acid sequence of SEQ ID NO: 239.

[0124] In some embodiments, P₁ comprises the amino acid sequence according to SEQ ID NO: 27 or a peptide sequence that has 1, 2, or 3, amino acid substitutions, additions, or deletions relative to the amino acid sequence of SEQ ID NO: 27.

[0125] In some embodiments, P₁ comprises the amino acid sequence according to SEQ ID NO: 26 or a peptide sequence that has 1, 2, or 3, amino acid substitutions, additions, or deletions relative to the amino acid sequence of SEQ ID NO: 26.

[0126] In some embodiments, P₁ comprises the amino acid sequence according to SEQ ID NO: 239.

[0127] In some embodiments, P₁ comprises the amino acid sequence according to SEQ ID NO: 27.

[0128] In some embodiments, P₁ comprises the amino acid sequence according to SEQ ID NO: 26.

[0129] In some embodiments, P₂ impairs binding of A₂ to a second target antigen. In some embodiments, wherein P₂ impairs binding of A₂ to TROP2. In some embodiments, P₂ is bound to A₂ through ionic interactions, electrostatic interactions, hydrophobic interactions, Pi-stacking interactions, and H-bonding interactions, or a combination thereof. In some embodiments, P₂ is bound to A₂ at or near an antigen binding site. In some embodiments, P₂ becomes unbound from A₂ when L₂ is cleaved by the tumor specific protease thereby exposing A₂ to TROP2. In some embodiments, the protease comprises a matrix metalloprotease (MMP) or a serine protease. In some embodiments, the matrix metalloprotease comprises MMP2, MMP7, MMP9, MMP13, or MMP14. In some embodiments, the serine protease comprises matriptase (MTSP1), urokinase, or hepsin. In some embodiments, P₂ has less than 70% sequence identity to the TROP2. In some embodiments, P₂ has less than 75% sequence identity to TROP2. In some embodiments, P₂ has less than 80% sequence identity to TROP2. In some embodiments, P₂ has less than 85% sequence identity to the TROP2. In some embodiments, P₂ has less than 90% sequence identity to TROP2. In some embodiments, P₂ has less than 95% sequence identity to TROP2. In some embodiments, P₂ has less than 98% sequence identity to TROP2. In some embodiments, P₂ has less than 99% sequence identity to the TROP2. In some embodiments, P₂ comprises a de novo amino acid sequence that shares less than 10% sequence identity to TROP2. In some embodiments, P₂ comprises an amino acid sequence according to any one of SEQ ID NOs: 23-25. In some embodiments, P₂ comprises the amino acid sequence of SEQ ID NO: 23. In some embodiments, P₂ comprises the amino acid sequence of SEQ ID NO: 24. In some embodiments, P₂ comprising the amino acid sequence of SEQ ID NO: 25.

[0130] In some embodiments, P₂ comprises an amino acid sequence according to X₁-X₂-X₃-X₄-C-X₆-X₇-X₈-X₉-X₁₀-C-X₁₂-X₁₃-X₁₄ and X₁ is selected from N, D, S, Y, A, F, H, T, L, and V; X₂ is selected from S, T, D, A, H, V, Y, N, F, I, and L; X₃ is selected from L, I, and V; X₄ is selected from F, L, V, M, W, I, Y, and H; X₆ is selected from V, F, L, I, and W; X₇ is selected from K, R, Q, N, H, and M; X₈ is selected from N and K; X₉ is selected from L, V, and I; X₁₀ is selected from Y, W, F, Q, and L; X₁₂ is selected from W and V; X₁₃ is selected from I, N, H, T, V, Y, and D; X₁₄ is selected from D, V, A, S, I, T, N, Y, H, and P. In some embodiments, X₁ is selected from N, D, S, Y, A, F, and T; X₂ is selected from S, T, D, A, H, V, Y, and N; X₃ is L; X₄ is selected from F, L, V, M, and W; X₆ is selected from V, F, and L; X₇ is selected from K, R, Q, and N; X₈ is selected from N and K; X₉ is selected from L, V, and I; X₁₀ is selected from Y, W, and F; X₁₂ is W; X₁₃ is selected from I, N, H, and T; and X₁₄ is selected from D, V, A, S, I, T, and N. In some embodiments, X₁ is selected from N, D, S, and Y; X₂ is selected from S, T, and D; X₃ is L; X₄ is selected from F, L, and V; X₆ is selected from V and F; X₇ is selected from K, R, and Q; X₈ is N; X₉ is selected from L and V; X₁₀ is selected from Y and W; X₁₂ is W; X₁₃ is selected from I, N, and H; X₁₄ is selected from D, V, A, and S.

[0131] In some embodiments, P₂ comprises an amino acid sequence according to an amino acid sequence according to J₁-J₂-J₃-C-J₅-J₆-J₇-J₈-W-J₁₀-J₁₁-C-J₁₃-J₁₄ and J₁ is selected V, I, L, P, E, F, and M; J₂ is selected from D and N; J₃ is selected from F and W; J₅ is selected from A, E, S, R, K, Y, L, Q, G, M, F, T, W, and D; J₆ is selected from L, M, I, V, F, T, R, and S; J₇ is selected from Y, F, and N; J₈ is selected from N, R, D, H, K, Q, S, G, A, E, and M; J₁₀ is selected from P and R; J₁₁ is selected from V and I; J₁₃ is selected from D, G, N, R, S, Q, Y, T, A, E, L, V, K, M, I, H, F, and W; and J₁₄ is selected from T, S, Q, L, D, N, A, E, K, M, V, R, I, H, P, V, and W. In some embodiments, J₁ is selected from V, I, and L; J₂ is D; J₃ is F; J₅ is selected from A, E, S, R, K, Y, and L; J₆ is selected from L, M, and I; J₇ is Y; J₈ is selected from N, R, D, H, K, Q, S, and G; J₁₀ is P; J₁ is selected from V and I; J₁₃ is selected from D, G, N, R, S, Q, Y, T, and A; and J₁₄ is selected from T, S, Q, L, D, N, A, and E. In some embodiments, J₁ is selected from V, I, and L; J₂ is D; J₃ is F; J₅ is selected from A, E, S, and R; J₆ is selected from L, M, and I; J₇ is Y; J₈ is selected from N, R, and D; J₁₀ is P; J₁₁ is selected from V and I; J₁₃ is selected from D, G, N, R, S, and Q; and J₁₄ is selected from T, S, Q, and L.

[0132] In some embodiments, P₂ comprises an amino acid sequence according to an amino acid sequence according to B₁-B₂-B₃-C-B₅-B₆-B₇-B₈-W-B₁₀-B₁₁-C-B₁₃-B₁₄ and B₁ is selected from V, I, L, P, E, F, and M; B₂ is selected from D and N; B₃ is selected from F and W; B₅ is selected from A, E, S, R, K, Y, L, Q, G, M, F, T, W, and D; B₆ is selected from L, M, I, V, F, T, R, and S; B₇ is selected from Y, F, and N; B₈ is selected from N, R, D, H, K, Q, S, G, A, E, and M; B₁₀ is selected from P and R; B₁₁ is selected from V and I; B₁₃ is selected from D, G, N, R, S, Q, Y, T, A, E, L, V, K, M, I, H, F, and W; and B₁₄ is selected from T, S, Q, L, D, N, A, E, K, M, V, R, I, H, P, V, G, and W. In some embodiments, B₁ is selected from V, I, and L; B₂ is D; B₃ is F; B₅ is selected from A, E, S, R, K, Y, M, G, and L; B₆ is selected from L, M, and I; B₇ is Y; B₈ is selected from N, R, D, H, K, Q, S, and G; B₁₀ is P; B₁₁ is selected from V and I; B₁₃ is selected from D, G, N, R, S, Q, Y, T, H, and A; and B₁₄ is selected from T, S, Q, L, D, N, A, G, and E. In some embodiments, B₁ is selected from V, I, and L; B₂ is D; B₃ is F; B₈ is selected from A, E, S, K, M, G, and R; B₆ is selected from L, M, and I; B₇ is Y; B₈ is selected from N, R, S, H, and D; B₁₀ is P; B₁₁ is selected from V and I; B₁₃ is selected from D, G, N, R, S, H, A, Y, and Q; B₁₄ is selected from T, S, Q, G, and L.

[0133] In some embodiments, P₂ comprises the amino acid sequences according to SEQ ID NOs: 133-145.

[0134] In some embodiments, P₂ comprises the amino acid sequences according to SEQ ID NOs: 146-158.

[0135] In some embodiments, P₂ comprises an amino acid sequence according to any of the sequences of Table 27.

[0136] In some embodiments, P₂ comprises the amino acid sequences according to SEQ ID NOs: 159-178.

[0137] In some embodiments, P₂ comprises an amino acid sequence according to any of the sequences of Table 29.

[0138] In some embodiments, P₂ comprises the amino acid sequences according to SEQ ID NOs: 179-201.

[0139] In some embodiments, P₂ comprises the amino acid sequence according to SEQ ID NO: 24 or a peptide sequence that has 1, 2, or 3, amino acid substitutions, additions, or deletions relative to the amino acid sequence of SEQ ID NO: 24.

[0140] In some embodiments, P₂ comprises the amino acid sequence according to SEQ ID NO: 181 or a peptide sequence that has 1, 2, or 3, amino acid substitutions, additions, or deletions relative to the amino acid sequence of SEQ ID NO: 181.

[0141] In some embodiments, P₂ comprises the amino acid sequence according to SEQ ID NO: 186 or a peptide sequence that has 1, 2, or 3, amino acid substitutions, additions, or deletions relative to the amino acid sequence of SEQ ID NO: 186.

[0142] In some embodiments, P₂ comprises the amino acid sequence according to SEQ ID NO: 24.

[0143] In some embodiments, P₂ comprises the amino acid sequence according to SEQ ID NO: 181.

[0144] In some embodiments, P₂ comprises the amino acid sequence according to SEQ ID NO: 186.

[0145] In some embodiments, P₁ₐ when L₁ₐ is uncleaved impairs binding of the first antigen recognizing molecule to the effector cell antigen. In some embodiments, the first antigen recognizing molecule comprises an antibody or antibody fragment. In some embodiments, the effector cell antigen is an anti-CD3 effector cell antigen. In some embodiments, P₁ₐ has less than 70% sequence identity to the effector cell antigen. In some embodiments, P₁ₐ has less than 75% sequence identity to the effector cell antigen. In some embodiments, P₁ₐ has less than 80% sequence identity to the effector cell antigen. In some embodiments, P₁ₐ has less than 85% sequence identity to the effector cell antigen. In some embodiments, P₁ₐ has less than 90% sequence identity to the effector cell antigen. In some embodiments, P₁ₐ has less than 95% sequence identity to the effector cell antigen. In some embodiments, P₁ₐ has less than 98% sequence identity to the effector cell antigen. In some embodiments, P₁ₐ has less than 99% sequence identity to the effector cell antigen. In some embodiments, P₁ₐ comprises a de novo amino acid sequence that shares less than 10% sequence identity to the second effector cell antigen. In some embodiments, P₁ₐ comprises an amino acid sequence according to SEQ ID NO: 26 or 27 or 122.

[0146] In some embodiments, P₁ₐ comprises an amino acid sequence according to Z₁-Z₂-C-Z₄-P-Z₆-Z₇-Z₈—Z₉-Z₁₀-Z₁₁-Z₁₂-C-Z₁₄ and Z₁ is selected from D, Y, F, I, N, V, H, L, A, T, S, and P; Z₂ is selected from D, Y, L, F, I, N, A, V, H, T, and S; Z₄ is selected from G and W; Z₆ is selected from E, D, V, and P; Z₇ is selected from W, L, F, V, G, M, I, and Y; Z₈ is selected from E, D, P, and Q; Z₉ is selected from E, D, Y, V, F, W, P, L, and Q; Z₁₀ is selected from S, D, Y, T, I, F, V, N, A, P, L, and H; Z₁₁ is selected from I, Y, F, V, L, T, N, S, D, A, and H; Z₁₂ is selected from F, D, Y, L, I, V, A, N, T, P, S, and H; and Z₁₄ is selected from D, Y, N, F, I, P, V, A, T, H, L and S. In some embodiments, Z₁ is selected from D, Y, F, I, and N; Z₂ is selected from D, Y, L, F, I, and N; Z₄ is selected from G and W; Z₆ is selected from E and D; Z₇ is selected from W, L, F, and V; Z₈ is selected from E and D; Z₉ is selected from E, D, Y, and V; Z₁₀ is selected from S, D, Y, T, and I; Z₁ is selected from I, Y, F, V, L, and T; Z₁₂ is selected from F, D, Y, L, I, V, A, and N; and Z₁₄ is selected from D, Y, N, F, I, and P. In some embodiments, Z₁ is selected from D, Y, and F; Z₂ is selected from D, Y, L, and F; Z₄ is selected from G and W; Z₆ is selected from E and D; Z₇ is selected from W, L, and F; Z₈ is selected from E and D; Z₉ is selected from E and D; Z₁₀ is selected from S, D, and Y; Z₁ is selected from I, Y, and F; Z₁₂ is selected from F, D, Y, and L; and Z₁₄ is selected from D, Y, and N.

[0147] In some embodiments, P₁ₐ comprises an amino acid sequence according to U₁-U₂-C-U₄-P-U₆-U₇—U₈-U₉-U₁₀-U₁₁-U₁₂-C-U₁₄ and U₁ is selected from D, Y, F, I, N, V, H, L, A, T, S, and P; U₂ is selected from D, Y, L, F, I, N, A, V, H, T, and S; U₄ is selected from G and W; U₆ is selected from E, D, V, and P; U₇ is selected from W, L, F, V, G, M, I, and Y; U₈ is selected from E, D, P, and Q; U₉ is selected from E, D, Y, V, F, W, P, L, and Q; U₁₀ is selected from S, D, Y, T, I, F, V, N, A, P, L, and H; U₁₁ is selected from I, Y, F, V, L, T, N, S, D, A, and H; U₁₂ is selected from F, D, Y, L, I, V, A, N, T, P, S, G, and H; and U₁₄ is selected from D, Y, N, F, I, P, V, A, T, H, L, M, and S. In some embodiments, U₁ is selected from D, Y, F, I, V, and N; U₂ is selected from D, Y, L, F, I, and N; U₄ is selected from G and W; U₆ is selected from E and D; U₇ is selected from W, L, F, G, and V; U₈ is selected from E and D; U₉ is selected from E, D, Y, and V; U₁₀ is selected from S, D, Y, T, and I; U₁₁ is selected from I, Y, F, V, L, and T; U₁₂ is selected from F, D, Y, L, I, V, A, G, and N; and U₁₄ is selected from D, Y, N, F, I, M, and P. In some embodiments, U₁ is selected from D, Y, V, and F; U₂ is selected from D, Y, L, and F; U₄ is selected from G and W; U₆ is selected from E and D; U₇ is selected from W, L, G, and F; U₈ is selected from E and D; U₉ is selected from E and D; U₁₀ is selected from S, D, T, and Y; U₁₁ is selected from I, Y, V, L, and F; U₁₂ is selected from F, D, Y, G, A, and L; and U₁₄ is selected from D, Y, M, and N.

[0148] In some embodiments, P₁ₐ comprises the amino acid sequences according to SEQ ID NOs: 202-228.

[0149] In some embodiments, P₁ₐ comprises an amino acid sequence according to any of the sequences of Table 35.

[0150] In some embodiments, P₁ₐ comprises the amino acid sequences according to SEQ ID NOs: 229-240.

[0151] In some embodiments, P₁ₐ comprises the amino acid sequence according to SEQ ID NO: 239 or a peptide sequence that has 1, 2, or 3, amino acid substitutions, additions, or deletions relative to the amino acid sequence of SEQ ID NO: 239.

[0152] In some embodiments, P₁ₐ comprises the amino acid sequence according to SEQ ID NO: 27 or a peptide sequence that has 1, 2, or 3, amino acid substitutions, additions, or deletions relative to the amino acid sequence of SEQ ID NO: 27.

[0153] In some embodiments, P₁ₐ comprises the amino acid sequence according to SEQ ID NO: 26 or a peptide sequence that has 1, 2, or 3, amino acid substitutions, additions, or deletions relative to the amino acid sequence of SEQ ID NO: 26.

[0154] In some embodiments, P₁ₐ comprises the amino acid sequence according to SEQ ID NO: 239.

[0155] In some embodiments, P₁ₐ comprises the amino acid sequence according to SEQ ID NO: 27.

[0156] In some embodiments, P₁ₐ comprises the amino acid sequence according to SEQ ID NO: 26.

[0157] In some embodiments, P₁, P₂, or P₁ₐ comprises a peptide sequence of at least 5 amino acids in length. In some embodiments, P₁, P₂, or P₁ₐ comprises a peptide sequence of at least 6 amino acids in length. In some embodiments, P₁, P₂, or P₁ₐ comprises a peptide sequence of at least 10 amino acids in length. In some embodiments, P₁, P₂, or P₁ₐ comprises a peptide sequence of at least 10 amino acids in length and no more than 20 amino acids in length. In some embodiments, P₁, P₂, or P₁ₐ comprises a peptide sequence of at least 16 amino acids in length. In some embodiments, P₁, P₂, or P₁ₐ comprises a peptide sequence of no more than 40 amino acids in length. In some embodiments, P₁, P₂, or P₁ₐ comprises at least two cysteine amino acid residues. In some embodiments, P₁, P₂, or P₁ₐ comprises a cyclic peptide or a linear peptide. In some embodiments, P₁, P₂, or P₁ₐ comprises a cyclic peptide. In some embodiments, P₁, P₂, or P₁ₐ comprises a linear peptide.

[0158] In some embodiments, P₁, P₂, or P₁ₐ or P₁, P₂, and P₁ₐ comprise a modified amino acid or non-natural amino acid, or a modified non-natural amino acid, or a combination thereof. In some embodiments, the modified amino acid or a modified non-natural amino acid comprises a post-translational modification. In some embodiments P₁, P₂, or P₁ₐ or P₁, P₂, and P₁ₐ comprise a modification including, but not limited to acetylation, acylation, ADP-ribosylation, amidation, covalent attachment of flavin, covalent attachment of a heme moiety, covalent attachment of a nucleotide or nucleotide derivative, covalent attachment of a lipid or lipid derivative, covalent attachment of phosphatidylinositol, cross-linking, cyclization, disulfide bond formation, demethylation, formation of covalent crosslinks, formation of cystine, formation of pyroglutamate, formylation, gamma carboxylation, glycosylation, GPI anchor formation, hydroxylation, iodination, methylation, myristoylation, oxidation, proteolytic processing, phosphorylation, prenylation, racemization, selenoylation, sulfation, transfer-RNA mediated addition of amino acids to proteins such as arginylation, and ubiquitination. Modifications are made anywhere to P₁, P₂, or P₁ₐ or P₁, P₂, and P₁ₐ including the peptide backbone, the amino acid side chains, and the terminus.

[0159] In some embodiments, P₁, P₂, or P₁ₐ does not comprise albumin or an albumin fragment. In some embodiments, P₁, P₂, or P₁ₐ does not comprise an albumin binding domain.

Linking Moiety (L₁, L₂, L₃, and L₁ₐ)

[0160] In some embodiments, L₁, L₂, L₃, or L₁ₐ is a peptide sequence having at least 5 to no more than 50 amino acids. In some embodiments L₁, L₂, L₃, or L₁ₐ is a peptide sequence having at least 10 to no more than 30 amino acids. In some embodiments, L₁, L₂, L₃, or L₁ₐ is a peptide sequence having at least 10 amino acids. In some embodiments, L₁, L₂, L₃, or L₁ₐ is a peptide sequence having at least 18 amino acids. In some embodiments, L₁, L₂, L₃, or L₁ₐ is a peptide sequence having at least 26 amino acids. In some embodiments, L₁, L₂, L₃, or L₁ₐ has a formula comprising (G₂S)ₙ (SEQ ID NO: 243), wherein n is an integer from 1 to 3. In some embodiments, L₁, L₂, L₃, or L₁ₐ has a formula comprising (G₂S)ₙ, wherein n is an integer of at least 1. In some embodiments, L₁, L₂, L₃, or L₁ₐ has a formula selected from the group consisting of (G₂S)ₙ, (GS)ₙ, (GSGGS)ₙ (SEQ ID NO: 62), (GGGS)ₙ (SEQ ID NO: 63), (GGGGS)ₙ (SEQ ID NO: 64), and (GSSGGS)ₙ (SEQ ID NO: 65), wherein n is an integer of at least 1. In some embodiments, the tumor specific protease is selected from the group consisting of metalloprotease, serine protease, cysteine protease, threonine protease, and aspartic protease. In some embodiments L₁, L₂, L₃, or L₁ₐ comprises a urokinase cleavable amino acid sequence, a matriptase cleavable amino acid sequence, a legumain cleavable amino acid sequence, or a matrix metalloprotease cleavable amino acid sequence. In some embodiments, the protease comprises a matrix metalloprotease (MMP) or a serine protease. In some embodiments, the matrix metalloprotease comprises MMP2, MMP7, MMP9, MMP13, or MMP14. In some embodiments, the serine protease comprises matriptase (MTSP1), urokinase, or hepsin.

[0161] In some embodiments, L₁, L₂, L₃, or L₁ₐ comprises a sequence as disclosed in Table 4 or a sequence substantially identical thereto (e.g., a sequence that has 0, 1, or 2 amino acid modifications).

[0162] In some embodiments, L₁, comprises the sequence of Linker-25 (SEQ ID NO: 54). In some embodiments, L₁, comprises the sequence of Linker-26 (SEQ ID NO: 55). In some embodiments, L₁, comprises the sequence of Linker-27 (SEQ ID NO: 56). In some embodiments, L₁, comprises the sequence of Linker-28 (SEQ ID NO: 57).

[0163] In some embodiments, L₂, comprises the sequence of Linker-25 (SEQ ID NO: 54). In some embodiments, L₂, comprises the sequence of Linker-26 (SEQ ID NO: 55). In some embodiments, L₂, comprises the sequence of Linker-27 (SEQ ID NO: 56). In some embodiments, L₂, comprises the sequence of Linker-28 (SEQ ID NO: 57).

TABLE 4
L₁, L₂, L₃, and L₁ₐ Sequences

| | | SEQ |
|---|---|---|
| Construct | Amino Acid Sequence | ID |
| Description | (N to C) | NO: |
| Linker 1 | GGGGSGGGGSGGGGS | 28 |
| Linker 2 | GGGGS | 29 |
| Linker 3 | GGGGSGGGS | 30 |
| Cleavable | GGGGSGGGLSGRSDAGSPLGL | 31 |
| linker 1 | AGSGGGS | |
| Cleavable | GGGGSGGLSGRSDAGSPLGLA | 32 |
| linker 2 | GSGGS | |
| Linker 4 | GGGGSLSGRSDNHGSSGT | 33 |
| Linker 5 | GGGGSSGGSGGSGLSGRSDNH | 34 |
| | GSSGT | |
| Linker 6 | ASGRSDNH | 35 |
| Linker 7 | LAGRSDNH | 36 |
| Linker 8 | ISSGLASGRSDNH | 37 |
| Linker 9 | ISSGLLAGRSDNH | 38 |
| Linker 10 | LSGRSDNH | 39 |
| Linker 11 | ISSGLLSGRSDNP | 40 |
| Linker 12 | ISSGLLSGRSDNH | 41 |
| Linker 13 | LSGRSDNHSPLGLAGS | 42 |
| Linker 14 | SPLGLAGSLSGRSDNH | 43 |
| Linker 15 | SPLGLSGRSDNH | 44 |
| Linker 16 | LAGRSDNHSPLGLAGS | 45 |
| Linker 17 | LSGRSDNHVPLSLKMG | 46 |
| Linker 18 | LSGRSDNHVPLSLSMG | 47 |
| Linker 19 | GSSGGSGGSGGSGISSGLLSGR | 48 |
| | SDNHGSSGT | |
| Linker 20 | GSSGGSGGSGGISSGLLSGRSD | 49 |
| | NHGGGS | |
| Linker 21 | ASGRSDNH | 50 |
| Linker 22 | LAGRSDNH | 51 |
| Linker 23 | ISSGLASGRSDNH | 52 |
| Linker 24 | LSGRSDAG | 53 |
| Linker 25 | ISSGLLSGRSDAG | 54 |
| Linker 26 | AAGLLAPPGGLSGRSDAG | 55 |
| Linker 27 | SPLGLSGRSDAG | 56 |
| Linker 28 | LSGRSDAGSPLGLAG | 57 |
| Cleavable | GGGGSSGGSAAGLLAPPGGLS | 58 |
| linker 3 | GRSDAGGGGS | |
| Cleavable | GSSGGSAAGLLAPPGGLSGRS | 59 |
| linker 4 | DAGGGGS | |
| Non-cleavable | GGGGSGGGGGSGGGGSGGAS | 60 |
| linker 1 | SGAGGSGGS | |
| Non-cleavable | GGGGSGGGSGGGGSGGASSG | 61 |
| linker 2 | AGGSGGGS | |

[0164] In some embodiments, L₁ is bound to N-terminus of A₁. In some embodiments, L₁ is bound to C-terminus of A₁. In some embodiments, L₂ is bound to N-terminus of A₂. In some embodiments, L₂ is bound to C-terminus of A₂. In some embodiments, P₁ becomes unbound from A₁ when L₁ is cleaved by the tumor specific protease thereby exposing A₁ to the effector cell antigen. In some embodiments, P₂ becomes unbound from A₂ when L₂ is cleaved by the tumor specific protease thereby exposing A₂ to TROP2.

[0165] In some embodiments, L₁, L₂, L₃, or L₁ₐ comprise a modified amino acid or non-natural amino acid, or a modified non-natural amino acid, or a combination thereof. In some embodiments, the modified amino acid or a modified non-natural amino acid comprises a post-translational modification. In some embodiments, L₁, L₂, L₃, or L₁ₐ comprise a modification including, but not limited, to acetylation, acylation, ADP-ribosylation, amidation, covalent attachment of flavin, covalent attachment of a heme moiety, covalent attachment of a nucleotide or nucleotide derivative, covalent attachment of a lipid or lipid derivative, covalent attachment of phosphatidylinositol, cross-linking, cyclization, disulfide bond formation, demethylation, formation of covalent crosslinks, formation of cystine, formation of pyroglutamate, formylation, gamma carboxylation, glycosylation, GPI anchor formation, hydroxylation, iodination, methylation, myristoylation, oxidation, proteolytic processing, phosphorylation, prenylation, racemization, selenoylation, sulfation, transfer-RNA mediated addition of amino acids to proteins such as arginylation, and ubiquitination. Modifications are made anywhere to L₁, L₂, L₃, or L₁ₐ including the peptide backbone, or the amino acid side chains.

[0166] In some embodiments, the cleavable linker is cleavable by a protease. In some embodiments, the protease is present in higher levels in a disease-state microenvironment relative to levels in healthy tissue or a microenvironment that is not the disease-state microenvironment. In some embodiments, the protease comprises a tumor specific protease. In some embodiments, the protease comprises a matrix metalloprotease (MMP) or a serine protease. In some embodiments, the matrix metalloprotease comprises MMP2, MMP7, MMP9, MMP13, or MMP14. In some embodiments, the matrix metalloprotease is selected from the group consisting of MMP2, MMP7, MMP9, MMP13, and MMP14. In some embodiments, the matrix metalloprotease comprises MMP2. In some embodiments, the matrix metalloprotease comprises MMP7. In some embodiments, the matrix metalloprotease comprises MMP9. In some embodiments, the matrix metalloprotease comprises MMP13. In some embodiments, the matrix metalloprotease comprises MMP14. In some embodiments, the serine protease comprises matriptase (MTSP1), urokinase, or hepsin. In some embodiments, the serine protease is selected from the group consisting of matriptase (MTSP1), urokinase, and hepsin. In some embodiments, the serine protease comprises matriptase (MTSP1). In some embodiments, the serine protease comprises urokinase. In some embodiments, the serine protease comprises hepsin. In some embodiments, the cleavable linker is cleaved by a variety of proteases. In some embodiments, the cleavable linker is cleaved by at least 1, 2, 3, 4, 5, 6, 7, 8, 9, 10, 15, 20, or more than 20 different proteases.

Half-Life Extending Molecule (H₁ and H₁ₐ)

[0167] In some embodiments, H₁ does not block A₁ binding to the effector cell antigen. In some embodiments, H₁ comprises a linking moiety (L₃) that connects H₁ to P₁. In some embodiments, H₁ₐ does not block the first antigen recognizing molecule binding to the effector cell antigen. In some embodiments, H₁ₐ comprises a linking moiety (L₃) that connects H₁ₐ to P₁ₐ. In some embodiments, the half-life extending molecule (H₁ or H₁ₐ) does not have binding affinity to the first antigen recognizing molecule. In some embodiments, the half-life extending molecule (H₁ or H₁ₐ) does not have binding affinity to the effector cell antigen. In some embodiments, the half-life extending molecule (H₁ or H₁ₐ) does not shield the first antigen recognizing molecule from the effector cell antigen. In some embodiments, the half-life extending molecule (H₁ or H₁ₐ) is not directly linked to the first antigen recognizing molecule.

[0168] In some embodiments, H₁ or H₁ₐ comprises a sequence as disclosed in Table 5 or a sequence substantially identical thereto (e.g., a sequence that has at least 90%, 95%, 96%, 97%, 98%, or 99% sequence identity).

TABLE 5
H₁ and H₁ₐ Sequences

| | Amino Acid Sequence | |
|---|---|---|
| Construct Description | (N to C) | SEQ ID NO: |
| Anti-Albumin: CDR-H1 | GSTFYTAV | 66 |
| Anti-Albumin: CDR-H2 | IRWTALTT | 67 |
| Anti-Albumin: CDR-H3 | AARGTLGLFTTADSYDY | 68 |
| Anti-albumin | EVQLVESGGGLVQPGGSLRLSCAASGSTF | 69 |
| | YTAVMGWVRQAPGKGLEWVAAIRWTA | |
| | LTTSYADSVKGRFTISRDGAKTTLYLQM | |
| | NSLRPEDTAVYYCAARGTLGLFTTADSY | |
| | DYWGQGTLVTVSS | |
| 10G Anti-Albumin: CDR-H1 | GFTFSKFG | 70 |
| 10G Anti-Albumin: CDR-H2 | ISGSGRDT | 71 |
| 10G Anti-Albumin: CDR-H3 | TIGGSLSV | 72 |
| 10G Anti-albumin | EVQLVESGGGLVQPGNSLRLSCAASGFT | 73 |
| | FSKFGMSWVRQAPGKGLEWVSSISGSGR | |
| | DTLYADSVKGRFTISRDNAKTTLYLQMN | |
| | SLRPEDTAVYYCTIGGSLSVSSQGTLVTV | |
| | SS | |

[0169] In some embodiments, H₁ or H₁ₐ comprise an amino acid sequence that has repetitive sequence motifs. In some embodiments, H₁ or H₁ₐ comprises an amino acid sequence that has highly ordered secondary structure. “Highly ordered secondary structure,” as used in this context, means that at least about 50%, or about 70%, or about 80%, or about 90%, of amino acid residues of H₁ or H₁ₐ contribute to secondary structure, as measured or determined by means, including, but not limited to, spectrophotometry (e.g. by circular dichroism spectroscopy in the “far-UV” spectral region (190-250 nm), and computer programs or algorithms, such as the Chou-Fasman algorithm and the Gamier-Osguthorpe-Robson (“GOR”) algorithm.

[0170] In some embodiments, H₁ or H₁ₐ comprises a polymer. In some embodiments, the polymer is polyethylene glycol (PEG). In some embodiments, H₁ or H₁ₐ comprises albumin. In some embodiments, H₁ or H₁ₐ comprises an Fc domain. In some embodiments, the albumin is serum albumin. In some embodiments, the albumin is human serum albumin. In some embodiments, H₁ or H₁ₐ comprises a polypeptide, a ligand, or a small molecule. In some embodiments, the polypeptide, the ligand or the small molecule binds serum protein or a fragment thereof, a circulating immunoglobulin or a fragment thereof, or CD35/CR1. In some embodiments, the serum protein comprises a thyroxine-binding protein, a transthyretin, a 1-acid glycoprotein, a transferrin, transferrin receptor or a transferrin-binding portion thereof, a fibrinogen, or an albumin. In some embodiments, the circulating immunoglobulin molecule comprises IgG1, IgG2, IgG3, IgG4, slgA, IgM or IgD. In some embodiments, the serum protein is albumin. In some embodiments, the polypeptide is an antibody. In some embodiments, the antibody comprises a single domain antibody, a single chain variable fragment or a Fab. In some embodiments, the single domain antibody comprises a single domain antibody that binds to albumin. In some embodiments, the single domain antibody is a human or humanized antibody. In some embodiments, the single domain antibody is selected from the group consisting of 645gH1gL1, 645dsgH5gL4, 23-13-A01-sc02, A10m3 or a fragment thereof, DOM7r-31, DOM7h-11-15, Alb-1, Alb-8, Alb-23, 10G, 10E and SA21. In some embodiments, the single domain antibody comprises complementarity determining regions (CDRs): HC-CDR1, HC-CDR2, and HC-CDR3, wherein the HC-CDR1, the HC-CDR2, and the HC-CDR3 of the single domain antibody comprise: HC-CDR1: SEQ ID NO: 66, HC-CDR2: SEQ ID NO: 67, and HC-CDR3: SEQ ID NO: 68. In some embodiments, the single domain antibody comprises complementarity determining regions (CDRs): HC-CDR1, HC-CDR2, and HC-CDR3, wherein the HC-CDR1, the HC-CDR2, and the HC-CDR3 of the single domain antibody comprise: HC-CDR1: SEQ ID NO: 66, HC-CDR2: SEQ ID NO: 67, and HC-CDR3: SEQ ID NO: 68; and wherein the CDRs comprise from 0-2 amino acid modifications in at least one of the HC-CDR1, HC-CDR2, or HC-CDR3. In some embodiments, the single domain antibody comprises complementarity determining regions (CDRs): HC-CDR1, HC-CDR2, and HC-CDR3, wherein the HC-CDR1, the HC-CDR2, and the HC-CDR3 of the single domain antibody comprise: HC-CDR1: SEQ ID NO: 70, HC-CDR2: SEQ ID NO: 71, and HC-CDR3: SEQ ID NO: 72. In some embodiments, the single domain antibody comprises complementarity determining regions (CDRs): HC-CDR1, HC-CDR2, and HC-CDR3, wherein the HC-CDR1, the HC-CDR2, and the HC-CDR3 of the single domain antibody comprise: HC-CDR1: SEQ ID NO: 70, HC-CDR2: SEQ ID NO: 71, and HC-CDR3: SEQ ID NO: 72; and wherein the CDRs comprise from 0-2 amino acid modifications in at least one of the HC-CDR1, HC-CDR2, or HC-CDR3.

[0171] In some embodiments, H₁ comprises an amino acid sequence according to SEQ ID NO: 69. In some embodiments, H₁ comprises an amino acid sequence that has at least 80% sequence identity to SEQ ID NO: 69. In some embodiments, H₁ comprises an amino acid sequence that has at least 85% sequence identity to SEQ ID NO: 69. In some embodiments, H₁ comprises an amino acid sequence that has at least 90% sequence identity to SEQ ID NO: 69. In some embodiments, H₁ comprises an amino acid sequence that has at least 95% sequence identity to SEQ ID NO: 69. In some embodiments, H₁ comprises an amino acid sequence that has at least 99% sequence identity to SEQ ID NO: 69.

[0172] In some embodiments, H₁ comprises an amino acid sequence according to SEQ ID NO: 73. In some embodiments, H₁ comprises an amino acid sequence that has at least 80% sequence identity to SEQ ID NO: 73. In some embodiments, H₁ comprises an amino acid sequence that has at least 85% sequence identity to SEQ ID NO: 73. In some embodiments, H₁ comprises an amino acid sequence that has at least 90% sequence identity to SEQ ID NO: 73. In some embodiments, H₁ comprises an amino acid sequence that has at least 95% sequence identity to SEQ ID NO: 73. In some embodiments, H₁ comprises an amino acid sequence that has at least 99% sequence identity to SEQ ID NO: 73.

[0173] In some embodiments, H₁ₐ comprises an amino acid sequence according to SEQ ID NO: 69. In some embodiments, H₁ₐ comprises an amino acid sequence that has at least 80% sequence identity to SEQ ID NO: 69. In some embodiments, H₁ₐ comprises an amino acid sequence that has at least 85% sequence identity to SEQ ID NO: 69. In some embodiments, H₁ₐ comprises an amino acid sequence that has at least 90% sequence identity to SEQ ID NO: 69. In some embodiments, H₁ₐ comprises an amino acid sequence that has at least 95% sequence identity to SEQ ID NO: 69. In some embodiments, H₁ₐ comprises an amino acid sequence that has at least 99% sequence identity to SEQ ID NO: 69.

[0174] In some embodiments, H₁ₐ comprises an amino acid sequence according to SEQ ID NO: 73. In some embodiments, H₁ₐ comprises an amino acid sequence that has at least 80% sequence identity to SEQ ID NO: 73. In some embodiments, H₁ₐ comprises an amino acid sequence that has at least 85% sequence identity to SEQ ID NO: 73. In some embodiments, H₁ₐ comprises an amino acid sequence that has at least 90% sequence identity to SEQ ID NO: 73. In some embodiments, H₁ₐ comprises an amino acid sequence that has at least 95% sequence identity to SEQ ID NO: 73. In some embodiments, H₁ₐ comprises an amino acid sequence that has at least 99% sequence identity to SEQ ID NO: 73.

[0175] In some embodiments, H₁ or H₁ₐ or H₁ and H₁ₐ comprise a modified amino acid or non-natural amino acid, or a modified non-natural amino acid, or a combination thereof. In some embodiments, the modified amino acid or a modified non-natural amino acid comprises a post-translational modification. In some embodiments H₁ or H₁ₐ or H₁ and H₁ₐ comprise a modification including, but not limited to acetylation, acylation, ADP-ribosylation, amidation, covalent attachment of flavin, covalent attachment of a heme moiety, covalent attachment of a nucleotide or nucleotide derivative, covalent attachment of a lipid or lipid derivative, covalent attachment of phosphatidylinositol, cross-linking, cyclization, disulfide bond formation, demethylation, formation of covalent crosslinks, formation of cystine, formation of pyroglutamate, formylation, gamma carboxylation, glycosylation, GPI anchor formation, hydroxylation, iodination, methylation, myristoylation, oxidation, proteolytic processing, phosphorylation, prenylation, racemization, selenoylation, sulfation, transfer-RNA mediated addition of amino acids to proteins such as arginylation, and ubiquitination. Modifications are made anywhere to H₁ or H₁ₐ or H₁ and H₁ₐ including the peptide backbone, the amino acid side chains, and the terminus.

[0176] In some embodiments, H₁ comprises a linking moiety (L₃) that connects H₁ to P₁. In some embodiments, L₃ is a peptide sequence having at least 5 to no more than 50 amino acids. In some embodiments, L₃ is a peptide sequence having at least 10 to no more than 30 amino acids. In some embodiments, L₃ is a peptide sequence having at least 10 amino acids. In some embodiments, L₃ is a peptide sequence having at least 18 amino acids. In some embodiments, L₃ is a peptide sequence having at least 26 amino acids. In some embodiments, L₃ has a formula selected from the group consisting of (G₂S)ₙ, (GS)ₙ, (GSGGS)ₙ (SEQ ID NO: 62), (GGGS)ₙ (SEQ ID NO: 63), (GGGGS)ₙ (SEQ ID NO: 64), and (GSSGGS)ₙ (SEQ ID NO: 65), wherein n is an integer of at least 1. In some embodiments, L₃ comprises an amino acid sequence according to SEQ ID NO: 30.

[0177] In some embodiments, H₁ₐ comprises a linking moiety (L₁ₐ) that connects H₁ₐ to P₁ₐ. In some embodiments, L₁ₐ is a peptide sequence having at least 5 to no more than 50 amino acids. In some embodiments, L₁ₐ is a peptide sequence having at least 10 to no more than 30 amino acids. In some embodiments, L₁ₐ is a peptide sequence having at least 10 amino acids. In some embodiments, L₁ₐ is a peptide sequence having at least 18 amino acids. In some embodiments, L₁ₐ is a peptide sequence having at least 26 amino acids. In some embodiments, L₁ₐ has a formula selected from the group consisting of (G₂S)ₙ, (GS)ₙ, (GSGGS)ₙ (SEQ ID NO: 62), (GGGS)ₙ (SEQ ID NO: 63), (GGGGS)ₙ (SEQ ID NO: 64), and (GSSGGS)ₙ (SEQ ID NO: 65), wherein n is an integer of at least 1. In some embodiments, L₁ₐ comprises an amino acid sequence according to any one of SEQ ID NOs: 28-61.

Antibodies that Bind to TROP2 and CD3

[0178] In some embodiments, the isolated polypeptide or polypeptide complex comprises an amino acid sequence disclosed in Table 6 or a sequence substantially identical thereto (e.g., a sequence that has at least 90%, 95%, 96%, 97%, 98%, or 99% sequence identity). In some embodiments, the isolated polypeptide or polypeptide complex comprises an amino acid sequence with at least 95% sequence identity to SEQ ID NOs: 74-132, and 241-242. In some embodiments, the isolated polypeptide or polypeptide complex comprises an amino acid sequence with at least 95% sequence identity to SEQ ID NO: 82. In some embodiments, the isolated polypeptide or polypeptide complex comprises an amino acid sequence with at least 95% sequence identity to SEQ ID NO: 83.

TABLE 6
Polypeptide complex sequences

| | Amino Acid Sequence | |
|---|---|---|
| Construct Description | (N to C) | SEQ ID NO: |
| PC1: LC | DIQLTQSPSSLSASVGDRVSITCKASQDVSIAVA | 74 |
| TROP2 Fab LC | WYQQKPGKAPKLLIYSASYRYTGVPDRFSGSGS | |
| | GTDFTLTISSLQPEDFAVYYCQQHYITPLTFGAG | |
| | TKVEIKRTVAAPSVFIFPPSDEQLKSGTASVVCLL | |
| | NNFYPREAKVQWKVDNALQSGNSQESVTEQDS | |
| | KDSTYSLSSTLTLSKADYEKHKVYACEVTHQGL | |
| | SSPVTKSFNRGEC | |
| PC1: HC | QTVVTQEPSLTVSPGGTVTLTCRSSTGAVTTSNY | 75 |
| SP34.194 scFv (VH- | ANWVQQKPGQAPRGLIGGTNKRAPGTPARFSGS | |
| linker 1-VL) + Linker | LLGGKAALTLSGVQPEDEAEYYCALWYSNLWV | |
| 2 + TROP2 Fab HC | FGGGTKLTVLGGGGSGGGGSGGGGSEVQLVES | |
| | GGGLVQPGGSLKLSCAASGFTFNTYAMNWVRQ | |
| | APGKGLEWVARIRSKYNNYATYYADSVKDRFT | |
| | ISRDDSKNTAYLQMNNLKTEDTAVYYCVRHGN | |
| | FGNSYVSWFAYWGQGTLVTVSSGGGGSQVQLQ | |
| | QSGSELKKPGASVKVSCKASGYTFTNYGMNWV | |
| | KQAPGQGLKWMGWINTYTGEPTYTDDFKGRF | |
| | AFSLDTSVSTAYLQISSLKADDTAVYFCARGGF | |
| | GSSYWYFDVWGQGSLVTVSSASTKGPSVFPLAP | |
| | SSKSTSGGTAALGCLVKDYFPEPVTVSWNSGAL | |
| | TSGVHTFPAVLQSSGLYSLSSVVTVPSSSLGTQT | |
| | YICNVNHKPSNTKVDKKVEPKSC | |
| PC2: LC | QTVVTQEPSLTVSPGGTVTLTCRSSTGAVTTSNY | 76 |
| SP34.194 scFv (VH- | ANWVQQKPGQAPRGLIGGTNKRAPGTPARFSGS | |
| linker 1-VL) + Linker | LLGGKAALTLSGVQPEDEAEYYCALWYSNLWV | |
| 2 + TROP2 Fab LC | FGGGTKLTVLGGGGSGGGGSGGGGSEVQLVES | |
| | GGGLVQPGGSLKLSCAASGFTFNTYAMNWVRQ | |
| | APGKGLEWVARIRSKYNNYATYYADSVKDRFT | |
| | ISRDDSKNTAYLQMNNLKTEDTAVYYCVRHGN | |
| | FGNSYVSWFAYWGQGTLVTVSSGGGGSDIQLT | |
| | QSPSSLSASVGDRVSITCKASQDVSIAVAWYQQ | |
| | KPGKAPKLLIYSASYRYTGVPDRFSGSGSGTDFT | |
| | LTISSLQPEDFAVYYCQQHYITPLTFGAGTKVEI | |
| | KRTVAAPSVFIFPPSDEQLKSGTASVVCLLNNFY | |
| | PREAKVQWKVDNALQSGNSQESVTEQDSKDST | |
| | YSLSSTLTLSKADYEKHKVYACEVTHQGLSSPV | |
| | TKSFNRGEC | |
| PC2: HC | QVQLQQSGSELKKPGASVKVSCKASGYTFTNY | 77 |
| TROP2 Fab HC | GMNWVKQAPGQGLKWMGWINTYTGEPTYTD | |
| | DFKGRFAFSLDTSVSTAYLQISSLKADDTAVYFC | |
| | ARGGFGSSYWYFDVWGQGSLVTVSSASTKGPS | |
| | VFPLAPSSKSTSGGTAALGCLVKDYFPEPVTVSW | |
| | NSGALTSGVHTFPAVLQSSGLYSLSSVVTVPSSS | |
| | LGTQTYICNVNHKPSNTKVDKKVEPKSC | |
| PC3: LC | DIQLTQSPSSLSASVGDRVSITCKASQDVSIAVA | 78 |
| TROP2 Fab LC | WYQQKPGKAPKLLIYSASYRYTGVPDRFSGSGS | |
| | GTDFTLTISSLQPEDFAVYYCQQHYITPLTFGAG | |
| | TKVEIKRTVAAPSVFIFPPSDEQLKSGTASVVCLL | |
| | NNFYPREAKVQWKVDNALQSGNSQESVTEQDS | |
| | KDSTYSLSSTLTLSKADYEKHKVYACEVTHQGL | |
| | SSPVTKSFNRGEC | |
| PC3: HC | EVQLVESGGGLVQPGGSLKLSCAASGFTFNKYA | 79 |
| SP34.185 scFv (VH- | MNWVRQAPGKGLEWVARIRSKYNNYATYYAD | |
| linker 1-VL) + Linker | SVKDRFTISRDDSKNTAYLQMNNLKTEDTAVYY | |
| 2 + TROP2 Fab HC | CVRHGNFGNSYISYWAYWGQGTLVTVSSGGG | |
| | GSGGGGSGGGGSQTVVTQEPSLTVSPGGTVTLT | |
| | CGSSTGAVTSGNYPNWVQQKPGQAPRGLIGGT | |
| | KFLAPGTPARFSGSLLGGKAALTLSGVQPEDEAE | |
| | YYCVLWYSNRWVFGGGTKLTVLGGGGSQVQL | |
| | QQSGSELKKPGASVKVSCKASGYTFTNYGMNW | |
| | VKQAPGQGLKWMGWINTYTGEPTYTDDFKGR | |
| | FAFSLDTSVSTAYLQISSLKADDTAVYFCARGGF | |
| | GSSYWYFDVWGQGSLVTVSSASTKGPSVFPLAP | |
| | SSKSTSGGTAALGCLVKDYFPEPVTVSWNSGAL | |
| | TSGVHTFPAVLQSSGLYSLSSVVTVPSSSLGTQT | |
| | YICNVNHKPSNTKVDKKVEPKSC | |
| PC4: LC | EVQLVESGGGLVQPGGSLKLSCAASGFTFNKYA | 80 |
| SP34.185 scFv (VH- | MNWVRQAPGKGLEWVARIRSKYNNYATYYAD | |
| linker 1-VL) + Linker | SVKDRFTISRDDSKNTAYLQMNNLKTEDTAVYY | |
| 2 + TROP2 Fab LC | CVRHGNFGNSYISYWAYWGQGTLVTVSSGGG | |
| | GSGGGGSGGGGSQTVVTQEPSLTVSPGGTVTLT | |
| | CGSSTGAVTSGNYPNWVQQKPGQAPRGLIGGT | |
| | KFLAPGTPARFSGSLLGGKAALTLSGVQPEDEAE | |
| | YYCVLWYSNRWVFGGGTKLTVLGGGGSDIQLT | |
| | QSPSSLSASVGDRVSITCKASQDVSIAVAWYQQ | |
| | KPGKAPKLLIYSASYRYTGVPDRFSGSGSGTDFT | |
| | LTISSLQPEDFAVYYCQQHYITPLTFGAGTKVEI | |
| | KRTVAAPSVFIFPPSDEQLKSGTASVVCLLNNFY | |
| | PREAKVQWKVDNALQSGNSQESVTEQDSKDST | |
| | YSLSSTLTLSKADYEKHKVYACEVTHQGLSSPV | |
| | TKSFNRGEC | |
| PC4: HC | QVQLQQSGSELKKPGASVKVSCKASGYTFTNY | 81 |
| TROP2 Fab HC | GMNWVKQAPGQGLKWMGWINTYTGEPTYTD | |
| | DFKGRFAFSLDTSVSTAYLQISSLKADDTAVYFC | |
| | ARGGFGSSYWYFDVWGQGSLVTVSSASTKGPS | |
| | VFPLAPSSKSTSGGTAALGCLVKDYFPEPVTVSW | |
| | NSGALTSGVHTFPAVLQSSGLYSLSSVVTVPSSS | |
| | LGTQTYICNVNHKPSNTKVDKKVEPKSC | |
| PC5: LC | GGVDFCKIYSWPVCHQGGGGSGGLSGRSDAGSP | 82 |
| TROP2 Fab mask | LGLAGSGGSDIQLTQSPSSLSASVGDRVSITCKAS | |
| (SEQ ID NO: 24) + | QDVSIAVAWYQQKPGKAPKLLIYSASYRYTGVP | |
| cleavable linker 2 + | DRFSGSGSGTDFTLTISSLQPEDFAVYYCQQHYI | |
| TROP2 Fab LC | TPLTFGAGTKVEIKRTVAAPSVFIFPPSDEQLKSG | |
| | TASVVCLLNNFYPREAKVQWKVDNALQSGNSQ | |
| | ESVTEQDSKDSTYSLSSTLTLSKADYEKHKVYA | |
| | CEVTHQGLSSPVTKSFNRGEC | |
| PC5: HC | EVQLVESGGGLVQPGGSLRLSCAASGSTFYTAV | 83 |
| Anti-albumin (SEQ ID | MGWVRQAPGKGLEWVAAIRWTALTTSYADSV | |
| NO: 69) + Linker 3 + | KGRFTISRDGAKTTLYLQMNSLRPEDTAVYYCA | |
| SP34.185 scFv | ARGTLGLFTTADSYDYWGQGTLVTVSSGGGGS | |
| mask (SEQ ID NO: 27) + | GGGSGGVYCGPEFDESVGCMGGGGSGGGLSGR | |
| Cleavable Linker 1 + | SDAGSPLGLAGSGGGSEVQLVESGGGLVQPGGS | |
| SP34.185 scFv (V- | LKLSCAASGFTFNKYAMNWVRQAPGKGLEWV | |
| linker 1-VL) + Linker | ARIRSKYNNYATYYADSVKDRFTISRDDSKNTA | |
| 2 + TROP2 Fab HC | YLQMNNLKTEDTAVYYCVRHGNFGNSYISYW | |
| | AYWGQGTLVTVSSGGGGSGGGGSGGGGSQTVV | |
| | TQEPSLTVSPGGTVTLTCGSSTGAVTSGNYPNW | |
| | VQQKPGQAPRGLIGGTKFLAPGTPARFSGSLLG | |
| | GKAALTLSGVQPEDEAEYYCVLWYSNRWVFG | |
| | GGTKLTVLGGGGSQVQLQQSGSELKKPGASVK | |
| | VSCKASGYTFTNYGMNWVKQAPGQGLKWMG | |
| | WINTYTGEPTYTDDFKGRFAFSLDTSVSTAYLQI | |
| | SSLKADDTAVYFCARGGFGSSYWYFDVWGQG | |
| | SLVTVSSASTKGPSVFPLAPSSKSTSGGTAALGCL | |
| | VKDYFPEPVTVSWNSGALTSGVHTFPAVLQSSG | |
| | LYSLSSVVTVPSSSLGTQTYICNVNHKPSNTKVD | |
| | KKVEPKSC | |
| PC6: LC | GGSVLFCVKNLYCWVTGGGGSGGLSGRSDAGS | 84 |
| TROP2 Fab mask | PLGLAGSGGSDIQLTQSPSSLSASVGDRVSITCKA | |
| (SEQ ID NO: 23) + | SQDVSIAVAWYQQKPGKAPKLLIYSASYRYTGV | |
| cleavable linker 2 + | PDRFSGSGSGTDFTLTISSLQPEDFAVYYCQQHY | |
| TROP2 Fab LC | ITPLTFGAGTKVEIKRTVAAPSVFIFPPSDEQLKS | |
| | GTASVVCLLNNFYPREAKVQWKVDNALQSGNS | |
| | QESVTEQDSKDSTYSLSSTLTLSKADYEKHKVY | |
| | ACEVTHQGLSSPVTKSFNRGEC | |
| PC6: HC | EVQLVESGGGLVQPGGSLRLSCAASGSTFYTAV | 85 |
| Anti-albumin (SEQ ID | MGWVRQAPGKGLEWVAAIRWTALTTSYADSV | |
| NO: 69) + Linker 3 + | KGRFTISRDGAKTTLYLQMNSLRPEDTAVYYCA | |
| SP34.185 scFv | ARGTLGLFTTADSYDYWGQGTLVTVSSGGGGS | |
| mask (SEQ ID NO: 27) + | GGGSGGVYCGPEFDESVGCMGGGGSGGGLSGR | |
| Cleavable Linker 1 + | SDAGSPLGLAGSGGGSEVQLVESGGGLVQPGGS | |
| SP34.185 scFv (VH- | LKLSCAASGFTFNKYAMNWVRQAPGKGLEWV | |
| linker 1-VL) + Linker | ARIRSKYNNYATYYADSVKDRFTISRDDSKNTA | |
| 2 + TROP2 Fab HC | YLQMNNLKTEDTAVYYCVRHGNFGNSYISYW | |
| | AYWGQGTLVTVSSGGGGSGGGGSGGGGSQTVV | |
| | TQEPSLTVSPGGTVTLTCGSSTGAVTSGNYPNW | |
| | VQQKPGQAPRGLIGGTKFLAPGTPARFSGSLLG | |
| | GKAALTLSGVQPEDEAEYYCVLWYSNRWVFG | |
| | GGTKLTVLGGGGSQVQLQQSGSELKKPGASVK | |
| | VSCKASGYTFTNYGMNWVKQAPGQGLKWMG | |
| | WINTYTGEPTYTDDFKGRFAFSLDTSVSTAYLQI | |
| | SSLKADDTAVYFCARGGFGSSYWYFDVWGQG | |
| | SLVTVSSASTKGPSVFPLAPSSKSTSGGTAALGCL | |
| | VKDYFPEPVTVSWNSGALTSGVHTFPAVLQSSG | |
| | LYSLSSVVTVPSSSLGTQTYICNVNHKPSNTKVD | |
| | KKVEPKSC | |
| PC7: LC | EVQLVESGGGLVQPGGSLRLSCAASGSTFYTAV | 86 |
| Anti-albumin (SEQ ID | MGWVRQAPGKGLEWVAAIRWTALTTSYADSV | |
| NO: 69) + Linker 3 + | KGRFTISRDGAKTTLYLQMNSLRPEDTAVYYCA | |
| SP34.185 scFv | ARGTLGLFTTADSYDYWGQGTLVTVSSGGGGS | |
| mask (SEQ ID NO: 27) + | GGGSGGVYCGPEFDESVGCMGGGGSGGGLSGR | |
| Cleavable linker 1 + | SDAGSPLGLAGSGGGSEVQLVESGGGLVQPGGS | |
| SP34.185 scFv (VH- | LKLSCAASGFTFNKYAMNWVRQAPGKGLEWV | |
| linker 1-VL) + Linker | ARIRSKYNNYATYYADSVKDRFTISRDDSKNTA | |
| 2 + TROP2 Fab LC | YLQMNNLKTEDTAVYYCVRHGNFGNSYISYW | |
| | AYWGQGTLVTVSSGGGGSGGGGSGGGGSQTVV | |
| | TQEPSLTVSPGGTVTLTCGSSTGAVTSGNYPNW | |
| | VQQKPGQAPRGLIGGTKFLAPGTPARFSGSLLG | |
| | GKAALTLSGVQPEDEAEYYCVLWYSNRWVFG | |
| | GGTKLTVLGGGGSDIQLTQSPSSLSASVGDRVSI | |
| | TCKASQDVSIAVAWYQQKPGKAPKLLIYSASYR | |
| | YTGVPDRFSGSGSGTDFTLTISSLQPEDFAVYYC | |
| | QQHYITPLTFGAGTKVEIKRTVAAPSVFIFPPSD | |
| | EQLKSGTASVVCLLNNFYPREAKVQWKVDNAL | |
| | QSGNSQESVTEQDSKDSTYSLSSTLTLSKADYEK | |
| | HKVYACEVTHQGLSSPVTKSFNRGEC | |
| PC7: HC | GGVDFCKIYSWPVCHQGGGGSGGLSGRSDAGSP | 87 |
| TROP2 Fab mask | LGLAGSGGSQVQLQQSGSELKKPGASVKVSCKA | |
| (SEQ ID NO: 24) + | SGYTFTNYGMNWVKQAPGQGLKWMGWINTY | |
| cleavable linker 2 + | TGEPTYTDDFKGRFAFSLDTSVSTAYLQISSLKA | |
| TROP2 Fab HC | DDTAVYFCARGGFGSSYWYFDVWGQGSLVTV | |
| | SSASTKGPSVFPLAPSSKSTSGGTAALGCLVKDY | |
| | FPEPVTVSWNSGALTSGVHTFPAVLQSSGLYSLS | |
| | SVVTVPSSSLGTQTYICNVNHKPSNTKVDKKVEP | |
| | KSC | |
| PC8: LC | EVQLVESGGGLVQPGGSLRLSCAASGSTFYTAV | 88 |
| Anti-albumin (SEQ ID | MGWVRQAPGKGLEWVAAIRWTALTTSYADSV | |
| NO: 69) + Linker 3 + | KGRFTISRDGAKTTLYLQMNSLRPEDTAVYYCA | |
| SP34.185 scFv | ARGTLGLFTTADSYDYWGQGTLVTVSSGGGGS | |
| mask (SEQ ID NO: 27) + | GGGSGGVYCGPEFDESVGCMGGGGSGGGLSGR | |
| Cleavable linker 1 + | SDAGSPLGLAGSGGGSEVQLVESGGGLVQPGGS | |
| SP34.185 scFv (VH- | LKLSCAASGFTFNKYAMNWVRQAPGKGLEWV | |
| linker 1-VL) + Linker | ARIRSKYNNYATYYADSVKDRFTISRDDSKNTA | |
| 2 + TROP2 Fab LC | YLQMNNLKTEDTAVYYCVRHGNFGNSYISYW | |
| | AYWGQGTLVTVSSGGGGSGGGGSGGGGSQTVV | |
| | TQEPSLTVSPGGTVTLTCGSSTGAVTSGNYPNW | |
| | VQQKPGQAPRGLIGGTKFLAPGTPARFSGSLLG | |
| | GKAALTLSGVQPEDEAEYYCVLWYSNRWVFG | |
| | GGTKLTVLGGGGSDIQLTQSPSSLSASVGDRVSI | |
| | TCKASQDVSIAVAWYQQKPGKAPKLLIYSASYR | |
| | YTGVPDRFSGSGSGTDFTLTISSLQPEDFAVYYC | |
| | QQHYITPLTFGAGTKVEIKRTVAAPSVFIFPPSD | |
| | EQLKSGTASVVCLLNNFYPREAKVQWKVDNAL | |
| | QSGNSQESVTEQDSKDSTYSLSSTLTLSKADYEK | |
| | HKVYACEVTHQGLSSPVTKSFNRGEC | |
| PC8: HC | GGSVLFCVKNLYCWVTGGGGSGGLSGRSDAGS | 89 |
| TROP2 Fab mask | PLGLAGSGGSQVQLQQSGSELKKPGASVKVSCK | |
| (SEQ ID NO: 23) + | ASGYTFTNYGMNWVKQAPGQGLKWMGWINT | |
| cleavable linker 2 + | YTGEPTYTDDFKGRFAFSLDTSVSTAYLQISSLK | |
| TROP2 Fab HC | ADDTAVYFCARGGFGSSYWYFDVWGQGSLVT | |
| | VSSASTKGPSVFPLAPSSKSTSGGTAALGCLVKD | |
| | YFPEPVTVSWNSGALTSGVHTFPAVLQSSGLYSL | |
| | SSVVTVPSSSLGTQTYICNVNHKPSNTKVDKKVE | |
| | PKSC | |
| PC9: LC | GGVDFCKIYSWPVCHQGGGGSGGLSGRSDAGSP | 90 |
| TROP2 Fab mask | LGLAGSGGSDIQLTQSPSSLSASVGDRVSITCKAS | |
| (SEQ ID NO: 24) + | QDVSIAVAWYQQKPGKAPKLLIYSASYRYTGVP | |
| cleavable linker 2 + | DRFSGSGSGTDFTLTISSLQPEDFAVYYCQQHYI | |
| TROP2 Fab LC | TPLTFGAGTKVEIKRTVAAPSVFIFPPSDEQLKSG | |
| | TASVVCLLNNFYPREAKVQWKVDNALQSGNSQ | |
| | ESVTEQDSKDSTYSLSSTLTLSKADYEKHKVYA | |
| | CEVTHQGLSSPVTKSFNRGEC | |
| PC9: HC | EVQLVESGGGLVQPGGSLRLSCAASGSTFYTAV | 91 |
| Anti-albumin (SEQ ID | MGWVRQAPGKGLEWVAAIRWTALTTSYADSV | |
| NO: 69) + Linker 3 + | KGRFTISRDGAKTTLYLQMNSLRPEDTAVYYCA | |
| SP34.185 scFv | ARGTLGLFTTADSYDYWGQGTLVTVSSGGGGS | |
| mask (SEQ ID NO: 26) + | GGGSGGGSQCLGPEWEVCPYGGGGSGGGLSGR | |
| Cleavable linker 1 + | SDAGSPLGLAGSGGGSEVQLVESGGGLVQPGGS | |
| SP34.185 scFv (VH- | LKLSCAASGFTFNKYAMNWVRQAPGKGLEWV | |
| linker 1-VL) + Linker | ARIRSKYNNYATYYADSVKDRFTISRDDSKNTA | |
| 2 + TROP2 Fab HC | YLQMNNLKTEDTAVYYCVRHGNFGNSYISYW | |
| | AYWGQGTLVTVSSGGGGSGGGGSGGGGSQTVV | |
| | TQEPSLTVSPGGTVTLTCGSSTGAVTSGNYPNW | |
| | VQQKPGQAPRGLIGGTKFLAPGTPARFSGSLLG | |
| | GKAALTLSGVQPEDEAEYYCVLWYSNRWVFG | |
| | GGTKLTVLGGGGSQVQLQQSGSELKKPGASVK | |
| | VSCKASGYTFTNYGMNWVKQAPGQGLKWMG | |
| | WINTYTGEPTYTDDFKGRFAFSLDTSVSTAYLQI | |
| | SSLKADDTAVYFCARGGFGSSYWYFDVWGQG | |
| | SLVTVSSASTKGPSVFPLAPSSKSTSGGTAALGCL | |
| | VKDYFPEPVTVSWNSGALTSGVHTFPAVLQSSG | |
| | LYSLSSVVTVPSSSLGTQTYICNVNHKPSNTKVD | |
| | KKVEPKSC | |
| PC10: LC | EVQLVESGGGLVQPGGSLRLSCAASGSTFYTAV | 92 |
| Anti-albumin (SEQ ID | MGWVRQAPGKGLEWVAAIRWTALTTSYADSV | |
| NO: 69) + Linker 3 + | KGRFTISRDGAKTTLYLQMNSLRPEDTAVYYCA | |
| SP34.185 scFv | ARGTLGLFTTADSYDYWGQGTLVTVSSGGGGS | |
| mask (SEQ ID NO: 26) + | GGGSGGGSQCLGPEWEVCPYGGGGSGGGLSGR | |
| Cleavable linker 1 + | SDAGSPLGLAGSGGGSEVQLVESGGGLVQPGGS | |
| SP34.185 scFv (VH- | LKLSCAASGFTFNKYAMNWVRQAPGKGLEWV | |
| linker 1-VL) + Linker | ARIRSKYNNYATYYADSVKDRFTISRDDSKNTA | |
| 2 + TROP2 Fab LC | YLQMNNLKTEDTAVYYCVRHGNFGNSYISYW | |
| | AYWGQGTLVTVSSGGGGSGGGGSGGGGSQTVV | |
| | TQEPSLTVSPGGTVTLTCGSSTGAVTSGNYPNW | |
| | VQQKPGQAPRGLIGGTKFLAPGTPARFSGSLLG | |
| | GKAALTLSGVQPEDEAEYYCVLWYSNRWVFG | |
| | GGTKLTVLGGGGSDIQLTQSPSSLSASVGDRVSI | |
| | TCKASQDVSIAVAWYQQKPGKAPKLLIYSASYR | |
| | YTGVPDRFSGSGSGTDFTLTISSLQPEDFAVYYC | |
| | QQHYITPLTFGAGTKVEIKRTVAAPSVFIFPPSD | |
| | EQLKSGTASVVCLLNNFYPREAKVQWKVDNAL | |
| | QSGNSQESVTEQDSKDSTYSLSSTLTLSKADYEK | |
| | HKVYACEVTHQGLSSPVTKSFNRGEC | |
| PC10: HC | GGVDFCKIYSWPVCHQGGGGSGGLSGRSDAGSP | 93 |
| TROP2 Fab mask | LGLAGSGGSQVQLQQSGSELKKPGASVKVSCKA | |
| (SEQ ID NO: 24) + | SGYTFTNYGMNWVKQAPGQGLKWMGWINTY | |
| cleavable linker 2 + | TGEPTYTDDFKGRFAFSLDTSVSTAYLQISSLKA | |
| TROP2 Fab HC | DDTAVYFCARGGFGSSYWYFDVWGQGSLVTV | |
| | SSASTKGPSVFPLAPSSKSTSGGTAALGCLVKDY | |
| | FPEPVTVSWNSGALTSGVHTFPAVLQSSGLYSLS | |
| | SVVTVPSSSLGTQTYICNVNHKPSNTKVDKKVEP | |
| | KSC | |
| PC11: LC | GGSVLFCVKNLYCWVTGGGGSGGLSGRSDAGS | 94 |
| TROP2 Fab mask | PLGLAGSGGSDIQLTQSPSSLSASVGDRVSITCKA | |
| (SEQ ID NO: 23) + | SQDVSIAVAWYQQKPGKAPKLLIYSASYRYTGV | |
| Cleavable linker 2 + | PDRFSGSGSGTDFTLTISSLQPEDFAVYYCQQHY | |
| TROP2 Fab LC | ITPLTFGAGTKVEIKRTVAAPSVFIFPPSDEQLKS | |
| | GTASVVCLLNNFYPREAKVQWKVDNALQSGNS | |
| | QESVTEQDSKDSTYSLSSTLTLSKADYEKHKVY | |
| | ACEVTHQGLSSPVTKSFNRGEC | |
| PC11: HC | EVQLVESGGGLVQPGGSLRLSCAASGSTFYTAV | 95 |
| Anti-albumin (SEQ ID | MGWVRQAPGKGLEWVAAIRWTALTTSYADSV | |
| NO: 69) + Linker 3 + | KGRFTISRDGAKTTLYLQMNSLRPEDTAVYYCA | |
| SP34.185 scFv | ARGTLGLFTTADSYDYWGQGTLVTVSSGGGGS | |
| mask (SEQ ID NO: 26) + | GGGSGGGSQCLGPEWEVCPYGGGGSGGGLSGR | |
| Cleavable linker 1 + | SDAGSPLGLAGSGGGSEVQLVESGGGLVQPGGS | |
| SP34.185 scFv (VH- | LKLSCAASGFTFNKYAMNWVRQAPGKGLEWV | |
| linker 1-VL) + Linker | ARIRSKYNNYATYYADSVKDRFTISRDDSKNTA | |
| 2 + TROP2 Fab HC | YLQMNNLKTEDTAVYYCVRHGNFGNSYISYW | |
| | AYWGQGTLVTVSSGGGGSGGGGSGGGGSQTVV | |
| | TQEPSLTVSPGGTVTLTCGSSTGAVTSGNYPNW | |
| | VQQKPGQAPRGLIGGTKFLAPGTPARFSGSLLG | |
| | GKAALTLSGVQPEDEAEYYCVLWYSNRWVFG | |
| | GGTKLTVLGGGGSQVQLQQSGSELKKPGASVK | |
| | VSCKASGYTFTNYGMNWVKQAPGQGLKWMG | |
| | WINTYTGEPTYTDDFKGRFAFSLDTSVSTAYLQI | |
| | SSLKADDTAVYFCARGGFGSSYWYFDVWGQG | |
| | SLVTVSSASTKGPSVFPLAPSSKSTSGGTAALGCL | |
| | VKDYFPEPVTVSWNSGALTSGVHTFPAVLQSSG | |
| | LYSLSSVVTVPSSSLGTQTYICNVNHKPSNTKVD | |
| | KKVEPKSC | |
| PC12: LC | EVQLVESGGGLVQPGGSLRLSCAASGSTFYTAV | 96 |
| Anti-albumin (SEQ ID | MGWVRQAPGKGLEWVAAIRWTALTTSYADSV | |
| NO: 69) + Linker 3 + | KGRFTISRDGAKTTLYLQMNSLRPEDTAVYYCA | |
| SP34.185 scFv | ARGTLGLFTTADSYDYWGQGTLVTVSSGGGGS | |
| mask (SEQ ID NO: 26) + | GGGSGGGSQCLGPEWEVCPYGGGGSGGGLSGR | |
| Cleavable linker 1 + | SDAGSPLGLAGSGGGSEVQLVESGGGLVQPGGS | |
| SP34.185 scFv (VH- | LKLSCAASGFTFNKYAMNWVRQAPGKGLEWV | |
| linker 1-VL) + Linker | ARIRSKYNNYATYYADSVKDRFTISRDDSKNTA | |
| 2 + TROP2 Fab LC | YLQMNNLKTEDTAVYYCVRHGNFGNSYISYW | |
| | AYWGQGTLVTVSSGGGGSGGGGSGGGGSQTVV | |
| | TQEPSLTVSPGGTVTLTCGSSTGAVTSGNYPNW | |
| | VQQKPGQAPRGLIGGTKFLAPGTPARFSGSLLG | |
| | GKAALTLSGVQPEDEAEYYCVLWYSNRWVFG | |
| | GGTKLTVLGGGGSDIQLTQSPSSLSASVGDRVSI | |
| | TCKASQDVSIAVAWYQQKPGKAPKLLIYSASYR | |
| | YTGVPDRFSGSGSGTDFTLTISSLQPEDFAVYYC | |
| | QQHYITPLTFGAGTKVEIKRTVAAPSVFIFPPSD | |
| | EQLKSGTASVVCLLNNFYPREAKVQWKVDNAL | |
| | QSGNSQESVTEQDSKDSTYSLSSTLTLSKADYEK | |
| | HKVYACEVTHQGLSSPVTKSFNRGEC | |
| PC12: HC | GGSVLFCVKNLYCWVTGGGGSGGLSGRSDAGS | 97 |
| TROP2 Fab mask | PLGLAGSGGSQVQLQQSGSELKKPGASVKVSCK | |
| (SEQ ID NO: 23) + | ASGYTFTNYGMNWVKQAPGQGLKWMGWINT | |
| cleavable linker 2 + | YTGEPTYTDDFKGRFAFSLDTSVSTAYLQISSLK | |
| TROP2 Fab HC | ADDTAVYFCARGGFGSSYWYFDVWGQGSLVT | |
| | VSSASTKGPSVFPLAPSSKSTSGGTAALGCLVKD | |
| | YFPEPVTVSWNSGALTSGVHTFPAVLQSSGLYSL | |
| | SSVVTVPSSSLGTQTYICNVNHKPSNTKVDKKVE | |
| | PKSC | |
| PC13: LC | GGVDFCKIYSWPVCHQGGGGSGGLSGRSDAGSP | 98 |
| TROP2 Fab mask | LGLAGSGGSDIQLTQSPSSLSASVGDRVSITCKAS | |
| (SEQ ID NO: 24) + | QDVSIAVAWYQQKPGKAPKLLIYSASYRYTGVP | |
| cleavable linker 2 + | DRFSGSGSGTDFTLTISSLQPEDFAVYYCQQHYI | |
| TROP2 Fab LC | TPLTFGAGTKVEIKRTVAAPSVFIFPPSDEQLKSG | |
| | TASVVCLLNNFYPREAKVQWKVDNALQSGNSQ | |
| | ESVTEQDSKDSTYSLSSTLTLSKADYEKHKVYA | |
| | CEVTHQGLSSPVTKSFNRGEC | |
| PC13: HC | EVQLVESGGGLVQPGNSLRLSCAASGFTFSKFG | 99 |
| 10G + Linker 3 + | MSWVRQAPGKGLEWVSSISGSGRDTLYADSVK | |
| SP34.185 scFv | GRFTISRDNAKTTLYLQMNSLRPEDTAVYYCTI | |
| mask (SEQ ID NO: 27) + | GGSLSVSSQGTLVTVSSGGGGSGGGSGGVYCGP | |
| Cleavable linker 1 + | EFDESVGCMGGGGSGGGLSGRSDAGSPLGLAGS | |
| SP34.185 scFv (VH- | GGGSEVQLVESGGGLVQPGGSLKLSCAASGFTF | |
| linker 1-VL) + Linker | NKYAMNWVRQAPGKGLEWVARIRSKYNNYAT | |
| 2 + TROP2 Fab HC | YYADSVKDRFTISRDDSKNTAYLQMNNLKTEDT | |
| | AVYYCVRHGNFGNSYISYWAYWGQGTLVTVS | |
| | SGGGGSGGGGSGGGGSQTVVTQEPSLTVSPGGT | |
| | VTLTCGSSTGAVTSGNYPNWVQQKPGQAPRGLI | |
| | GGTKFLAPGTPARFSGSLLGGKAALTLSGVQPE | |
| | DEAEYYCVLWYSNRWVFGGGTKLTVLGGGGS | |
| | QVQLQQSGSELKKPGASVKVSCKASGYTFTNY | |
| | GMNWVKQAPGQGLKWMGWINTYTGEPTYTD | |
| | DFKGRFAFSLDTSVSTAYLQISSLKADDTAVYFC | |
| | ARGGFGSSYWYFDVWGQGSLVTVSSASTKGPS | |
| | VFPLAPSSKSTSGGTAALGCLVKDYFPEPVTVSW | |
| | NSGALTSGVHTFPAVLQSSGLYSLSSVVTVPSSS | |
| | LGTQTYICNVNHKPSNTKVDKKVEPKSC | |
| PC14: LC | GGSVLFCVKNLYCWVTGGGGSGGLSGRSDAGS | 100 |
| TROP2 Fab mask | PLGLAGSGGSDIQLTQSPSSLSASVGDRVSITCKA | |
| (SEQ ID NO: 23) + | SQDVSIAVAWYQQKPGKAPKLLIYSASYRYTGV | |
| cleavable linker 2 + | PDRFSGSGSGTDFTLTISSLQPEDFAVYYCQQHY | |
| TROP2 Fab LC | ITPLTFGAGTKVEIKRTVAAPSVFIFPPSDEQLKS | |
| | GTASVVCLLNNFYPREAKVQWKVDNALQSGNS | |
| | QESVTEQDSKDSTYSLSSTLTLSKADYEKHKVY | |
| | ACEVTHQGLSSPVTKSFNRGEC | |
| PC14: HC | EVQLVESGGGLVQPGNSLRLSCAASGFTFSKFG | 101 |
| 10G + Linker 3 + | MSWVRQAPGKGLEWVSSISGSGRDTLYADSVK | |
| SP34.185 scFv | GRFTISRDNAKTTLYLQMNSLRPEDTAVYYCTI | |
| mask (SEQ ID NO: 27) + | GGSLSVSSQGTLVTVSSGGGGSGGGSGGVYCGP | |
| Cleavable linker 1 + | EFDESVGCMGGGGSGGGLSGRSDAGSPLGLAGS | |
| SP34.185 scFv (VH - | GGGSEVQLVESGGGLVQPGGSLKLSCAASGFTF | |
| linker 1 - VL) + Linker | NKYAMNWVRQAPGKGLEWVARIRSKYNNYAT | |
| 2 + TROP2 Fab HC | YYADSVKDRFTISRDDSKNTAYLQMNNLKTEDT | |
| | AVYYCVRHGNFGNSYISYWAYWGQGTLVTVS | |
| | SGGGGSGGGGSGGGGSQTVVTQEPSLTVSPGGT | |
| | VTLTCGSSTGAVTSGNYPNWVQQKPGQAPRGLI | |
| | GGTKFLAPGTPARFSGSLLGGKAALTLSGVQPE | |
| | DEAEYYCVLWYSNRWVFGGGTKLTVLGGGGS | |
| | QVQLQQSGSELKKPGASVKVSCKASGYTFTNY | |
| | GMNWVKQAPGQGLKWMGWINTYTGEPTYTD | |
| | DFKGRFAFSLDTSVSTAYLQISSLKADDTAVYFC | |
| | ARGGFGSSYWYFDVWGQGSLVTVSSASTKGPS | |
| | VFPLAPSSKSTSGGTAALGCLVKDYFPEPVTVSW | |
| | NSGALTSGVHTFPAVLQSSGLYSLSSVVTVPSSS | |
| | LGTQTYICNVNHKPSNTKVDKKVEPKSC | |
| PC15: LC | EVQLVESGGGLVQPGNSLRLSCAASGFTFSKFG | 102 |
| 10G + Linker 3 + | MSWVRQAPGKGLEWVSSISGSGRDTLYADSVK | |
| SP34.185 scFv | GRFTISRDNAKTTLYLQMNSLRPEDTAVYYCTI | |
| mask (SEQ ID NO: 27) + | GGSLSVSSQGTLVTVSSGGGGSGGGSGGVYCGP | |
| Cleavable linker 1 + | EFDESVGCMGGGGSGGGLSGRSDAGSPLGLAGS | |
| SP34.185 scFv (VH- | GGGSEVQLVESGGGLVQPGGSLKLSCAASGFTF | |
| linker 1-VL) + Linker | NKYAMNWVRQAPGKGLEWVARIRSKYNNYAT | |
| 2 + TROP2 Fab LC | YYADSVKDRFTISRDDSKNTAYLQMNNLKTEDT | |
| | AVYYCVRHGNFGNSYISYWAYWGQGTLVTVS | |
| | SGGGGSGGGGSGGGGSQTVVTQEPSLTVSPGGT | |
| | VTLTCGSSTGAVTSGNYPNWVQQKPGQAPRGLI | |
| | GGTKFLAPGTPARFSGSLLGGKAALTLSGVQPE | |
| | DEAEYYCVLWYSNRWVFGGGTKLTVLGGGGS | |
| | DIQLTQSPSSLSASVGDRVSITCKASQDVSIAVA | |
| | WYQQKPGKAPKLLIYSASYRYTGVPDRFSGSGS | |
| | GTDFTLTISSLQPEDFAVYYCQQHYITPLTFGAG | |
| | TKVEIKRTVAAPSVFIFPPSDEQLKSGTASVVCLL | |
| | NNFYPREAKVQWKVDNALQSGNSQESVTEQDS | |
| | KDSTYSLSSTLTLSKADYEKHKVYACEVTHQGL | |
| | SSPVTKSFNRGEC | |
| PC15: HC | GGVDFCKIYSWPVCHQGGGGSGGLSGRSDAGSP | 103 |
| TROP2 Fab mask | LGLAGSGGSQVQLQQSGSELKKPGASVKVSCKA | |
| (SEQ ID NO: 24) + | SGYTFTNYGMNWVKQAPGQGLKWMGWINTY | |
| cleavable linker 2 + | TGEPTYTDDFKGRFAFSLDTSVSTAYLQISSLKA | |
| TROP2 Fab HC | DDTAVYFCARGGFGSSYWYFDVWGQGSLVTV | |
| | SSASTKGPSVFPLAPSSKSTSGGTAALGCLVKDY | |
| | FPEPVTVSWNSGALTSGVHTFPAVLQSSGLYSLS | |
| | SVVTVPSSSLGTQTYICNVNHKPSNTKVDKKVEP | |
| | KSC | |
| PC16: LC | EVQLVESGGGLVQPGNSLRLSCAASGFTFSKFG | 104 |
| 10G + Linker 3 + | MSWVRQAPGKGLEWVSSISGSGRDTLYADSVK | |
| SP34.185 scFv | GRFTISRDNAKTTLYLQMNSLRPEDTAVYYCTI | |
| mask (SEQ ID NO: 27) + | GGSLSVSSQGTLVTVSSGGGGSGGGSGGVYCGP | |
| Cleavable linker 1 + | EFDESVGCMGGGGSGGGLSGRSDAGSPLGLAGS | |
| SP34.185 scFv (VH- | GGGSEVQLVESGGGLVQPGGSLKLSCAASGFTF | |
| linker 1-VL) + Linker | NKYAMNWVRQAPGKGLEWVARIRSKYNNYAT | |
| 2 + TROP2 Fab LC | YYADSVKDRFTISRDDSKNTAYLQMNNLKTEDT | |
| | AVYYCVRHGNFGNSYISYWAYWGQGTLVTVS | |
| | SGGGGSGGGGSGGGGSQTVVTQEPSLTVSPGGT | |
| | VTLTCGSSTGAVTSGNYPNWVQQKPGQAPRGLI | |
| | GGTKFLAPGTPARFSGSLLGGKAALTLSGVQPE | |
| | DEAEYYCVLWYSNRWVFGGGTKLTVLGGGGS | |
| | DIQLTQSPSSLSASVGDRVSITCKASQDVSIAVA | |
| | WYQQKPGKAPKLLIYSASYRYTGVPDRFSGSGS | |
| | GTDFTLTISSLQPEDFAVYYCQQHYITPLTFGAG | |
| | TKVEIKRTVAAPSVFIFPPSDEQLKSGTASVVCLL | |
| | NNFYPREAKVQWKVDNALQSGNSQESVTEQDS | |
| | KDSTYSLSSTLTLSKADYEKHKVYACEVTHQGL | |
| | SSPVTKSFNRGEC | |
| PC16: HC | GGSVLFCVKNLYCWVTGGGGSGGLSGRSDAGS | 105 |
| TROP2 Fab mask | PLGLAGSGGSQVQLQQSGSELKKPGASVKVSCK | |
| (SEQ ID NO: 23) + | ASGYTFTNYGMNWVKQAPGQGLKWMGWINT | |
| cleavable linker 2 + | YTGEPTYTDDFKGRFAFSLDTSVSTAYLQISSLK | |
| TROP2 Fab HC | ADDTAVYFCARGGFGSSYWYFDVWGQGSLVT | |
| | VSSASTKGPSVFPLAPSSKSTSGGTAALGCLVKD | |
| | YFPEPVTVSWNSGALTSGVHTFPAVLQSSGLYSL | |
| | SSVVTVPSSSLGTQTYICNVNHKPSNTKVDKKVE | |
| | PKSC | |
| PC17: LC | GGIDFCMLYNWPICAGGGGGSSGGSAAGLLAPP | 106 |
| | GGLSGRSDAGGGGSDIQLTQSPSSLSASVGDRVS | |
| | ITCKASQDVSIAVAWYQQKPGKAPKLLIYSASY | |
| | RYTGVPDRFSGSGSGTDFTLTISSLQPEDFAVYY | |
| | CQQHYITPLTFGAGTKVEIKRTVAAPSVFIFPPS | |
| | DEQLKSGTASVVCLLNNFYPREAKVQWKVDNA | |
| | LQSGNSQESVTEQDSKDSTYSLSSTLTLSKADYE | |
| | KHKVYACEVTHQGLSSPVTKSFNRGEC | |
| PC17: HC | EVQLVESGGGLVQPGNSLRLSCAASGFTFSKFG | 107 |
| | MSWVRQAPGKGLEWVSSISGSGRDTLYADSVK | |
| | GRFTISRDNAKTTLYLQMNSLRPEDTAVYYCTI | |
| | GGSLSVSSQGTLVTVSSGGGGSGGGSGGVYCGP | |
| | EFDESVGCMGSSGGSAAGLLAPPGGLSGRSDAG | |
| | GGGSEVQLVESGGGLVQPGGSLKLSCAASGFTF | |
| | NKYAMNWVRQAPGKGLEWVARIRSKYNNYAT | |
| | YYADSVKDRFTISRDDSKNTAYLQMNNLKTEDT | |
| | AVYYCVRHGNFGNSYISYWAYWGQGTLVTVS | |
| | SGGGGSGGGGSGGGGSQTVVTQEPSLTVSPGGT | |
| | VTLTCGSSTGAVTSGNYPNWVQQKPGQAPRGLI | |
| | GGTKFLAPGTPARFSGSLLGGKAALTLSGVQPE | |
| | DEAEYYCVLWYSNRWVFGGGTKLTVLGGGGS | |
| | QVQLQQSGSELKKPGASVKVSCKASGYTFTNY | |
| | GMNWVKQAPGQGLKWMGWINTYTGEPTYTD | |
| | DFKGRFAFSLDTSVSTAYLQISSLKADDTAVYFC | |
| | ARGGFGSSYWYFDVWGQGSLVTVSSASTKGPS | |
| | VFPLAPSSKSTSGGTAALGCLVKDYFPEPVTVSW | |
| | NSGALTSGVHTFPAVLQSSGLYSLSSVVTVPSSS | |
| | LGTQTYICNVNHKPSNTKVDKKVEPKSC | |
| PC18: LC | GGIDFCMLYNWPICAGGGGGSSGGSAAGLLAPP | 108 |
| | GGLSGRSDAGGGGSDIQLTQSPSSLSASVGDRVS | |
| | ITCKASQDVSIAVAWYQQKPGKAPKLLIYSASY | |
| | RYTGVPDRFSGSGSGTDFTLTISSLQPEDFAVYY | |
| | CQQHYITPLTFGAGTKVEIKRTVAAPSVFIFPPS | |
| | DEQLKSGTASVVCLLNNFYPREAKVQWKVDNA | |
| | LQSGNSQESVTEQDSKDSTYSLSSTLTLSKADYE | |
| | KHKVYACEVTHQGLSSPVTKSFNRGEC | |
| PC18: HC | EVQLVESGGGLVQPGGSLRLSCAASGSTFYTAV | 109 |
| | MGWVRQAPGKGLEWVAAIRWTALTTSYADSV | |
| | KGRFTISRDGAKTTLYLQMNSLRPEDTAVYYCA | |
| | ARGTLGLFTTADSYDYWGQGTLVTVSSGGGGS | |
| | GGGSGGVYCGPEFDESVGCMGSSGGSAAGLLAP | |
| | PGGLSGRSDAGGGGSEVQLVESGGGLVQPGGSL | |
| | KLSCAASGFTFNKYAMNWVRQAPGKGLEWVA | |
| | RIRSKYNNYATYYADSVKDRFTISRDDSKNTAY | |
| | LQMNNLKTEDTAVYYCVRHGNFGNSYISYWA | |
| | YWGQGTLVTVSSGGGGSGGGGSGGGGSQTVVT | |
| | QEPSLTVSPGGTVTLTCGSSTGAVTSGNYPNWV | |
| | QQKPGQAPRGLIGGTKFLAPGTPARFSGSLLGG | |
| | KAALTLSGVQPEDEAEYYCVLWYSNRWVFGG | |
| | GTKLTVLGGGGSQVQLQQSGSELKKPGASVKVS | |
| | CKASGYTFTNYGMNWVKQAPGQGLKWMGWI | |
| | NTYTGEPTYTDDFKGRFAFSLDTSVSTAYLQISS | |
| | LKADDTAVYFCARGGFGSSYWYFDVWGQGSL | |
| | VTVSSASTKGPSVFPLAPSSKSTSGGTAALGCLV | |
| | KDYFPEPVTVSWNSGALTSGVHTFPAVLQSSGL | |
| | YSLSSVVTVPSSSLGTQTYICNVNHKPSNTKVDK | |
| | KVEPKSC | |
| PC19: LC | EVQLVESGGGLVQPGGSLRLSCAASGSTFYTAV | 110 |
| | MGWVRQAPGKGLEWVAAIRWTALTTSYADSV | |
| | KGRFTISRDGAKTTLYLQMNSLRPEDTAVYYCA | |
| | ARGTLGLFTTADSYDYWGQGTLVTVSSGGGGS | |
| | GGGSGGVYCGPEFDESVGCMGSSGGSAAGLLAP | |
| | PGGLSGRSDAGGGGSEVQLVESGGGLVQPGGSL | |
| | KLSCAASGFTFNKYAMNWVRQAPGKGLEWVA | |
| | RIRSKYNNYATYYADSVKDRFTISRDDSKNTAY | |
| | LQMNNLKTEDTAVYYCVRHGNFGNSYISYWA | |
| | YWGQGTLVTVSSGGGGSGGGGSGGGGSQTVVT | |
| | QEPSLTVSPGGTVTLTCGSSTGAVTSGNYPNWV | |
| | QQKPGQAPRGLIGGTKFLAPGTPARFSGSLLGG | |
| | KAALTLSGVQPEDEAEYYCVLWYSNRWVFGG | |
| | GTKLTVLGGGGSDIQLTQSPSSLSASVGDRVSITC | |
| | KASQDVSIAVAWYQQKPGKAPKLLIYSASYRYT | |
| | GVPDRFSGSGSGTDFTLTISSLQPEDFAVYYCQQ | |
| | HYITPLTFGAGTKVEIKRTVAAPSVFIFPPSDEQL | |
| | KSGTASVVCLLNNFYPREAKVQWKVDNALQSG | |
| | NSQESVTEQDSKDSTYSLSSTLTLSKADYEKHKV | |
| | YACEVTHQGLSSPVTKSFNRGEC | |
| PC19: HC | GGIDFCMLYNWPICAGGGGGSSGGSAAGLLAPP | 111 |
| | GGLSGRSDAGGGGSQVQLQQSGSELKKPGASVK | |
| | VSCKASGYTFTNYGMNWVKQAPGQGLKWMG | |
| | WINTYTGEPTYTDDFKGRFAFSLDTSVSTAYLQI | |
| | SSLKADDTAVYFCARGGFGSSYWYFDVWGQG | |
| | SLVTVSSASTKGPSVFPLAPSSKSTSGGTAALGCL | |
| | VKDYFPEPVTVSWNSGALTSGVHTFPAVLQSSG | |
| | LYSLSSVVTVPSSSLGTQTYICNVNHKPSNTKVD | |
| | KKVEPKSC | |
| PC20: LC | EVQLVESGGGLVQPGNSLRLSCAASGFTFSKFG | 112 |
| | MSWVRQAPGKGLEWVSSISGSGRDTLYADSVK | |
| | GRFTISRDNAKTTLYLQMNSLRPEDTAVYYCTI | |
| | GGSLSVSSQGTLVTVSSGGGGSGGGSGGVYCGP | |
| | EFDESVGCMGSSGGSAAGLLAPPGGLSGRSDAG | |
| | GGGSEVQLVESGGGLVQPGGSLKLSCAASGFTF | |
| | NKYAMNWVRQAPGKGLEWVARIRSKYNNYAT | |
| | YYADSVKDRFTISRDDSKNTAYLQMNNLKTEDT | |
| | AVYYCVRHGNFGNSYISYWAYWGQGTLVTVS | |
| | SGGGGSGGGGSGGGGSQTVVTQEPSLTVSPGGT | |
| | VTLTCGSSTGAVTSGNYPNWVQQKPGQAPRGLI | |
| | GGTKFLAPGTPARFSGSLLGGKAALTLSGVQPE | |
| | DEAEYYCVLWYSNRWVFGGGTKLTVLGGGGS | |
| | DIQLTQSPSSLSASVGDRVSITCKASQDVSIAVA | |
| | WYQQKPGKAPKLLIYSASYRYTGVPDRFSGSGS | |
| | GTDFTLTISSLQPEDFAVYYCQQHYITPLTFGAG | |
| | TKVEIKRTVAAPSVFIFPPSDEQLKSGTASVVCLL | |
| | NNFYPREAKVQWKVDNALQSGNSQESVTEQDS | |
| | KDSTYSLSSTLTLSKADYEKHKVYACEVTHQGL | |
| | SSPVTKSFNRGEC | |
| PC20: HC | GGIDFCMLYNWPICAGGGGGSSGGSAAGLLAPP | 113 |
| | GGLSGRSDAGGGGSQVQLQQSGSELKKPGASVK | |
| | VSCKASGYTFTNYGMNWVKQAPGQGLKWMG | |
| | WINTYTGEPTYTDDFKGRFAFSLDTSVSTAYLQI | |
| | SSLKADDTAVYFCARGGFGSSYWYFDVWGQG | |
| | SLVTVSSASTKGPSVFPLAPSSKSTSGGTAALGCL | |
| | VKDYFPEPVTVSWNSGALTSGVHTFPAVLQSSG | |
| | LYSLSSVVTVPSSSLGTQTYICNVNHKPSNTKVD | |
| | KKVEPKSC | |
| PC21: LC | GGVDFCKIYSWPVCHQGGGGSSGGSAAGLLAPP | 114 |
| | GGLSGRSDAGGGGSDIQLTQSPSSLSASVGDRVS | |
| | ITCKASQDVSIAVAWYQQKPGKAPKLLIYSASY | |
| | RYTGVPDRFSGSGSGTDFTLTISSLQPEDFAVYY | |
| | CQQHYITPLTFGAGTKVEIKRTVAAPSVFIFPPS | |
| | DEQLKSGTASVVCLLNNFYPREAKVQWKVDNA | |
| | LQSGNSQESVTEQDSKDSTYSLSSTLTLSKADYE | |
| | KHKVYACEVTHQGLSSPVTKSFNRGEC | |
| PC21: HC | EVQLVESGGGLVQPGGSLRLSCAASGSTFYTAV | 115 |
| | MGWVRQAPGKGLEWVAAIRWTALTTSYADSV | |
| | KGRFTISRDGAKTTLYLQMNSLRPEDTAVYYCA | |
| | ARGTLGLFTTADSYDYWGQGTLVTVSSGGGGS | |
| | GGGSGGVYCGPEFDESVGCMGSSGGSAAGLLAP | |
| | PGGLSGRSDAGGGGSEVQLVESGGGLVQPGGSL | |
| | KLSCAASGFTFNKYAMNWVRQAPGKGLEWVA | |
| | RIRSKYNNYATYYADSVKDRFTISRDDSKNTAY | |
| | LQMNNLKTEDTAVYYCVRHGNFGNSYISYWA | |
| | YWGQGTLVTVSSGGGGSGGGGSGGGGSQTVVT | |
| | QEPSLTVSPGGTVTLTCGSSTGAVTSGNYPNWV | |
| | QQKPGQAPRGLIGGTKFLAPGTPARFSGSLLGG | |
| | KAALTLSGVQPEDEAEYYCVLWYSNRWVFGG | |
| | GTKLTVLGGGGSQVQLQQSGSELKKPGASVKVS | |
| | CKASGYTFTNYGMNWVKQAPGQGLKWMGWI | |
| | NTYTGEPTYTDDFKGRFAFSLDTSVSTAYLQISS | |
| | LKADDTAVYFCARGGFGSSYWYFDVWGQGSL | |
| | VTVSSASTKGPSVFPLAPSSKSTSGGTAALGCLV | |
| | KDYFPEPVTVSWNSGALTSGVHTFPAVLQSSGL | |
| | YSLSSVVTVPSSSLGTQTYICNVNHKPSNTKVDK | |
| | KVEPKSC | |
| PC22: LC | GGIDFCMLYNWPICAGGGGGSGGLSGRSDAGSP | 116 |
| | LGLAGSGGSDIQLTQSPSSLSASVGDRVSITCKAS | |
| | QDVSIAVAWYQQKPGKAPKLLIYSASYRYTGVP | |
| | DRFSGSGSGTDFTLTISSLQPEDFAVYYCQQHYI | |
| | TPLTFGAGTKVEIKRTVAAPSVFIFPPSDEQLKSG | |
| | TASVVCLLNNFYPREAKVQWKVDNALQSGNSQ | |
| | ESVTEQDSKDSTYSLSSTLTLSKADYEKHKVYA | |
| | CEVTHQGLSSPVTKSFNRGEC | |
| PC22: HC | EVQLVESGGGLVQPGGSLRLSCAASGSTFYTAV | 117 |
| | MGWVRQAPGKGLEWVAAIRWTALTTSYADSV | |
| | KGRFTISRDGAKTTLYLQMNSLRPEDTAVYYCA | |
| | ARGTLGLFTTADSYDYWGQGTLVTVSSGGGGS | |
| | GGGSGGVYCGPEFDESVGCMGGGGSGGGLSGR | |
| | SDAGSPLGLAGSGGGSEVQLVESGGGLVQPGGS | |
| | LKLSCAASGFTFNKYAMNWVRQAPGKGLEWV | |
| | ARIRSKYNNYATYYADSVKDRFTISRDDSKNTA | |
| | YLQMNNLKTEDTAVYYCVRHGNFGNSYISYW | |
| | AYWGQGTLVTVSSGGGGSGGGGSGGGGSQTVV | |
| | TQEPSLTVSPGGTVTLTCGSSTGAVTSGNYPNW | |
| | VQQKPGQAPRGLIGGTKFLAPGTPARFSGSLLG | |
| | GKAALTLSGVQPEDEAEYYCVLWYSNRWVFG | |
| | GGTKLTVLGGGGSQVQLQQSGSELKKPGASVK | |
| | VSCKASGYTFTNYGMNWVKQAPGQGLKWMG | |
| | WINTYTGEPTYTDDFKGRFAFSLDTSVSTAYLQI | |
| | SSLKADDTAVYFCARGGFGSSYWYFDVWGQG | |
| | SLVTVSSASTKGPSVFPLAPSSKSTSGGTAALGCL | |
| | VKDYFPEPVTVSWNSGALTSGVHTFPAVLQSSG | |
| | LYSLSSVVTVPSSSLGTQTYICNVNHKPSNTKVD | |
| | KKVEPKSC | |
| PC23: LC | GGIDFCMLYNWPICAGGGGGSGGLSGRSDAGSP | 118 |
| | LGLAGSGGSDIQLTQSPSSLSASVGDRVSITCKAS | |
| | QDVSIAVAWYQQKPGKAPKLLIYSASYRYTGVP | |
| | DRFSGSGSGTDFTLTISSLQPEDFAVYYCQQHYI | |
| | TPLTFGAGTKVEIKRTVAAPSVFIFPPSDEQLKSG | |
| | TASVVCLLNNFYPREAKVQWKVDNALQSGNSQ | |
| | ESVTEQDSKDSTYSLSSTLTLSKADYEKHKVYA | |
| | CEVTHQGLSSPVTKSFNRGEC | |
| PC23: HC | EVQLVESGGGLVQPGNSLRLSCAASGFTFSKFG | 119 |
| | MSWVRQAPGKGLEWVSSISGSGRDTLYADSVK | |
| | GRFTISRDNAKTTLYLQMNSLRPEDTAVYYCTI | |
| | GGSLSVSSQGTLVTVSSGGGGSGGGSGGVYCGP | |
| | EFDESVGCMGGGGSGGGLSGRSDAGSPLGLAGS | |
| | GGGSEVQLVESGGGLVQPGGSLKLSCAASGFTF | |
| | NKYAMNWVRQAPGKGLEWVARIRSKYNNYAT | |
| | YYADSVKDRFTISRDDSKNTAYLQMNNLKTEDT | |
| | AVYYCVRHGNFGNSYISYWAYWGQGTLVTVS | |
| | SGGGGSGGGGSGGGGSQTVVTQEPSLTVSPGGT | |
| | VTLTCGSSTGAVTSGNYPNWVQQKPGQAPRGLI | |
| | GGTKFLAPGTPARFSGSLLGGKAALTLSGVQPE | |
| | DEAEYYCVLWYSNRWVFGGGTKLTVLGGGGS | |
| | QVQLQQSGSELKKPGASVKVSCKASGYTFTNY | |
| | GMNWVKQAPGQGLKWMGWINTYTGEPTYTD | |
| | DFKGRFAFSLDTSVSTAYLQISSLKADDTAVYFC | |
| | ARGGFGSSYWYFDVWGQGSLVTVSSASTKGPS | |
| | VFPLAPSSKSTSGGTAALGCLVKDYFPEPVTVSW | |
| | NSGALTSGVHTFPAVLQSSGLYSLSSVVTVPSSS | |
| | LGTQTYICNVNHKPSNTKVDKKVEPKSC | |
| PC24: LC | GGIDFCMLYNWPICAGGGGGSGGGGGSGGGGS | 120 |
| | GGASSGAGGSGGSDIQLTQSPSSLSASVGDRVSIT | |
| | CKASQDVSIAVAWYQQKPGKAPKLLIYSASYRY | |
| | TGVPDRFSGSGSGTDFTLTISSLQPEDFAVYYCQ | |
| | QHYITPLTFGAGTKVEIKRTVAAPSVFIFPPSDEQ | |
| | LKSGTASVVCLLNNFYPREAKVQWKVDNALQS | |
| | GNSQESVTEQDSKDSTYSLSSTLTLSKADYEKHK | |
| | VYACEVTHQGLSSPVTKSFNRGEC | |
| PC24: HC | EVQLVESGGGLVQPGNSLRLSCAASGFTFSKFG | 121 |
| | MSWVRQAPGKGLEWVSSISGSGRDTLYADSVK | |
| | GRFTISRDNAKTTLYLQMNSLRPEDTAVYYCTI | |
| | GGSLSVSSQGTLVTVSSGGGGSGGGSGGVYCGP | |
| | EFDESVGCMGGGGSGGGSGGGGSGGASSGAGG | |
| | SGGGSEVQLVESGGGLVQPGGSLKLSCAASGFT | |
| | FNKYAMNWVRQAPGKGLEWVARIRSKYNNYA | |
| | TYYADSVKDRFTISRDDSKNTAYLQMNNLKTED | |
| | TAVYYCVRHGNFGNSYISYWAYWGQGTLVTV | |
| | SSGGGGSGGGGSGGGGSQTVVTQEPSLTVSPGG | |
| | TVTLTCGSSTGAVTSGNYPNWVQQKPGQAPRG | |
| | LIGGTKFLAPGTPARFSGSLLGGKAALTLSGVQP | |
| | EDEAEYYCVLWYSNRWVFGGGTKLTVLGGGG | |
| | SQVQLQQSGSELKKPGASVKVSCKASGYTFTNY | |
| | GMNWVKQAPGQGLKWMGWINTYTGEPTYTD | |
| | DFKGRFAFSLDTSVSTAYLQISSLKADDTAVYFC | |
| | ARGGFGSSYWYFDVWGQGSLVTVSSASTKGPS | |
| | VFPLAPSSKSTSGGTAALGCLVKDYFPEPVTVSW | |
| | NSGALTSGVHTFPAVLQSSGLYSLSSVVTVPSSS | |
| | LGTQTYICNVNHKPSNTKVDKKVEPKSC | |
| PC25: LC | GGVDFCGLYHWPICYQGGGGSGGLSGRSDAGSP | 123 |
| | LGLAGSGGSDIQLTQSPSSLSASVGDRVSITCKAS | |
| | QDVSIAVAWYQQKPGKAPKLLIYSASYRYTGVP | |
| | DRFSGSGSGTDFTLTISSLQPEDFAVYYCQQHYIT | |
| | PLTFGAGTKVEIKRTVAAPSVFIFPPSDEQLKSGT | |
| | ASVVCLLNNFYPREAKVQWKVDNALQSGNSQE | |
| | SVTEQDSKDSTYSLSSTLTLSKADYEKHKVYAC | |
| | EVTHQGLSSPVTKSFNRGEC | |
| PC25: HC | EVQLVESGGGLVQPGGSLRLSCAASGSTFYTAV | 124 |
| | MGWVRQAPGKGLEWVAAIRWTALTTSYADSV | |
| | KGRFTISRDGAKTTLYLQMNSLRPEDTAVYYCA | |
| | ARGTLGLFTTADSYDYWGQGTLVTVSSGGGGS | |
| | GGGSGGVYCGPEFDESVGCMGGGGSGGGLSGR | |
| | SDAGSPLGLAGSGGGSEVQLVESGGGLVQPGGS | |
| | LKLSCAASGFTFNKYAMNWVRQAPGKGLEWV | |
| | ARIRSKYNNYATYYADSVKDRFTISRDDSKNTA | |
| | YLQMNNLKTEDTAVYYCVRHGNFGNSYISYWA | |
| | YWGQGTLVTVSSGGGGSGGGGSGGGGSQTVVT | |
| | QEPSLTVSPGGTVTLTCGSSTGAVTSGNYPNWV | |
| | QQKPGQAPRGLIGGTKFLAPGTPARFSGSLLGGK | |
| | AALTLSGVQPEDEAEYYCVLWYSNRWVFGGGT | |
| | KLTVLGGGGSQVQLQQSGSELKKPGASVKVSCK | |
| | ASGYTFTNYGMNWVKQAPGQGLKWMGWINTY | |
| | TGEPTYTDDFKGRFAFSLDTSVSTAYLQISSLKA | |
| | DDTAVYFCARGGFGSSYWYFDVWGQGSLVTVS | |
| | SASTKGPSVFPLAPSSKSTSGGTAALGCLVKDYF | |
| | PEPVTVSWNSGALTSGVHTFPAVLQSSGLYSLSS | |
| | VVTVPSSSLGTQTYICNVNHKPSNTKVDKKVEP | |
| | KSC | |
| PC26: LC | EWVAAIRWTALTTSYADSVKGRFTISRDGAKTT | 125 |
| | LYLQMNSLRPEDTAVYYCAARGTLGLFTTADSY | |
| | DYWGQGTLVTVSSGGGGSGGGSGGVYCGPEFD | |
| | ESVGCMGGGGSGGGLSGRSDAGSPLGLAGSGG | |
| | GSEVQLVESGGGLVQPGGSLKLSCAASGFTFNK | |
| | YAMNWVRQAPGKGLEWVARIRSKYNNYATYY | |
| | ADSVKDRFTISRDDSKNTAYLQMNNLKTEDTAV | |
| | YYCVRHGNFGNSYISYWAYWGQGTLVTVSSGG | |
| | GGSGGGGSGGGGSQTVVTQEPSLTVSPGGTVTL | |
| | TCGSSTGAVTSGNYPNWVQQKPGQAPRGLIGGT | |
| | KFLAPGTPARFSGSLLGGKAALTLSGVQPEDEAE | |
| | YYCVLWYSNRWVFGGGTKLTVLGGGGSDIQLT | |
| | QSPSSLSASVGDRVSITCKASQDVSIAVAWYQQK | |
| | PGKAPKLLIYSASYRYTGVPDRFSGSGSGTDFTL | |
| | TISSLQPEDFAVYYCQQHYITPLTFGAGTKVEIKR | |
| | TVAAPSVFIFPPSDEQLKSGTASVVCLLNNFYPRE | |
| | AKVQWKVDNALQSGNSQESVTEQDSKDSTYSL | |
| | SSTLTLSKADYEKHKVYACEVTHQGLSSPVTKSF | |
| | NRGEC | |
| PC26: HC | GGVDFCGLYHWPICYQGGGGSGGLSGRSDAGSP | 126 |
| | LGLAGSGGSQVQLQQSGSELKKPGASVKVSCKA | |
| | SGYTFTNYGMNWVKQAPGQGLKWMGWINTYT | |
| | GEPTYTDDFKGRFAFSLDTSVSTAYLQISSLKAD | |
| | DTAVYFCARGGFGSSYWYFDVWGQGSLVTVSS | |
| | ASTKGPSVFPLAPSSKSTSGGTAALGCLVKDYFP | |
| | EPVTVSWNSGALTSGVHTFPAVLQSSGLYSLSSV | |
| | VTVPSSSLGTQTYICNVNHKPSNTKVDKKVEPKS | |
| | C | |
| PC27: LC | GGVDFCGLYHWPICYQGGGGSSGGSAAGLLAPP | 127 |
| | GGLSGRSDAGGGGSDIQLTQSPSSLSASVGDRVS | |
| | ITCKASQDVSIAVAWYQQKPGKAPKLLIYSASYR | |
| | YTGVPDRFSGSGSGTDFTLTISSLQPEDFAVYYC | |
| | QQHYITPLTFGAGTKVEIKRTVAAPSVFIFPPSDE | |
| | QLKSGTASVVCLLNNFYPREAKVQWKVDNALQ | |
| | SGNSQESVTEQDSKDSTYSLSSTLTLSKADYEKH | |
| | KVYACEVTHQGLSSPVTKSFNRGEC | |
| PC27: HC | EVQLVESGGGLVQPGGSLRLSCAASGSTFYTAV | 128 |
| | MGWVRQAPGKGLEWVAAIRWTALTTSYADSV | |
| | KGRFTISRDGAKTTLYLQMNSLRPEDTAVYYCA | |
| | ARGTLGLFTTADSYDYWGQGTLVTVSSGGGGS | |
| | GGGSGGVYCGPEFDESVGCMGSSGGSAAGLLAP | |
| | PGGLSGRSDAGGGGSEVQLVESGGGLVQPGGSL | |
| | KLSCAASGFTFNKYAMNWVRQAPGKGLEWVA | |
| | RIRSKYNNYATYYADSVKDRFTISRDDSKNTAY | |
| | LQMNNLKTEDTAVYYCVRHGNFGNSYISYWAY | |
| | WGQGTLVTVSSGGGGSGGGGSGGGGSQTVVTQ | |
| | EPSLTVSPGGTVTLTCGSSTGAVTSGNYPNWVQ | |
| | QKPGQAPRGLIGGTKFLAPGTPARFSGSLLGGKA | |
| | ALTLSGVQPEDEAEYYCVLWYSNRWVFGGGTK | |
| | LTVLGGGGSQVQLQQSGSELKKPGASVKVSCKA | |
| | SGYTFTNYGMNWVKQAPGQGLKWMGWINTYT | |
| | GEPTYTDDFKGRFAFSLDTSVSTAYLQISSLKAD | |
| | DTAVYFCARGGFGSSYWYFDVWGQGSLVTVSS | |
| | ASTKGPSVFPLAPSSKSTSGGTAALGCLVKDYFP | |
| | EPVTVSWNSGALTSGVHTFPAVLQSSGLYSLSSV | |
| | VTVPSSSLGTQTYICNVNHKPSNTKVDKKVEPKS | |
| | C | |
| PC28: LC | EVQLVESGGGLVQPGGSLRLSCAASGSTFYTAV | 129 |
| | MGWVRQAPGKGLEWVAAIRWTALTTSYADSV | |
| | KGRFTISRDGAKTTLYLQMNSLRPEDTAVYYCA | |
| | ARGTLGLFTTADSYDYWGQGTLVTVSSGGGGS | |
| | GGGSGGVYCGPEFDESVGCMGSSGGSAAGLLAP | |
| | PGGLSGRSDAGGGGSEVQLVESGGGLVQPGGSL | |
| | KLSCAASGFTFNKYAMNWVRQAPGKGLEWVA | |
| | RIRSKYNNYATYYADSVKDRFTISRDDSKNTAY | |
| | LQMNNLKTEDTAVYYCVRHGNFGNSYISYWAY | |
| | WGQGTLVTVSSGGGGSGGGGSGGGGSQTVVTQ | |
| | EPSLTVSPGGTVTLTCGSSTGAVTSGNYPNWVQ | |
| | QKPGQAPRGLIGGTKFLAPGTPARFSGSLLGGKA | |
| | ALTLSGVQPEDEAEYYCVLWYSNRWVFGGGTK | |
| | LTVLGGGGSDIQLTQSPSSLSASVGDRVSITCKAS | |
| | QDVSIAVAWYQQKPGKAPKLLIYSASYRYTGVP | |
| | DRFSGSGSGTDFTLTISSLQPEDFAVYYCQQHYIT | |
| | PLTFGAGTKVEIKRTVAAPSVFIFPPSDEQLKSGT | |
| | ASVVCLLNNFYPREAKVQWKVDNALQSGNSQE | |
| | SVTEQDSKDSTYSLSSTLTLSKADYEKHKVYAC | |
| | EVTHQGLSSPVTKSFNRGEC | |
| PC28: HC | GGVDFCGLYHWPICYQGGGGSSGGSAAGLLAPP | 130 |
| | GGLSGRSDAGGGGSQVQLQQSGSELKKPGASVK | |
| | VSCKASGYTFTNYGMNWVKQAPGQGLKWMG | |
| | WINTYTGEPTYTDDFKGRFAFSLDTSVSTAYLQI | |
| | SSLKADDTAVYFCARGGFGSSYWYFDVWGQGS | |
| | LVTVSSASTKGPSVFPLAPSSKSTSGGTAALGCL | |
| | VKDYFPEPVTVSWNSGALTSGVHTFPAVLQSSG | |
| | LYSLSSVVTVPSSSLGTQTYICNVNHKPSNTKVD | |
| | KKVEPKSC | |
| PC29: LC | GGVDFCGLYHWPICYQGGGGSGGGGGSGGGGS | 241 |
| | GGASSGAGGSDIQLTQSPSSLSASVGDRVSITCK | |
| | ASQDVSIAVAWYQQKPGKAPKLLIYSASYRYTG | |
| | VPDRFSGSGSGTDFTLTISSLQPEDFAVYYCQQH | |
| | YITPLTFGAGTKVEIKRTVAAPSVFIFPPSDEQLK | |
| | SGTASVVCLLNNFYPREAKVQWKVDNALQSGN | |
| | SQESVTEQDSKDSTYSLSSTLTLSKADYEKHKVY | |
| | ACEVTHQGLSSPVTKSFNRGEC | |
| PC29: HC | EVQLVESGGGLVQPGNSLRLSCAASGFTFSKFG | 131 |
| | MSWVRQAPGKGLEWVSSISGSGRDTLYADSVK | |
| | GRFTISRDNAKTTLYLQMNSLRPEDTAVYYCTIG | |
| | GSLSVSSQGTLVTVSSGGGGSGGGSGGVYCGPE | |
| | FDESVGCMGGGGSGGGSGGGGSGGASSGAGGS | |
| | GGGSEVQLVESGGGLVQPGGSLKLSCAASGFTF | |
| | NKYAMNWVRQAPGKGLEWVARIRSKYNNYAT | |
| | YYADSVKDRFTISRDDSKNTAYLQMNNLKTEDT | |
| | AVYYCVRHGNFGNSYISYWAYWGQGTLVTVSS | |
| | GGGGSGGGGSGGGGSQTVVTQEPSLTVSPGGTV | |
| | TLTCGSSTGAVTSGNYPNWVQQKPGQAPRGLIG | |
| | GTKFLAPGTPARFSGSLLGGKAALTLSGVQPEDE | |
| | AEYYCVLWYSNRWVFGGGTKLTVLGGGGSQV | |
| | QLQQSGSELKKPGASVKVSCKASGYTFTNYGM | |
| | NWVKQAPGQGLKWMGWINTYTGEPTYTDDFK | |
| | GRFAFSLDTSVSTAYLQISSLKADDTAVYFCARG | |
| | GFGSSYWYFDVWGQGSLVTVSSASTKGPSVFPL | |
| | APSSKSTSGGTAALGCLVKDYFPEPVTVSWNSG | |
| | ALTSGVHTFPAVLQSSGLYSLSSVVTVPSSSLGT | |
| | QTYICNVNHKPSNTKVDKKVEPKSC | |
| PC30: LC | EVQLVESGGGLVQPGNSLRLSCAASGFTFSKFG | 132 |
| | MSWVRQAPGKGLEWVSSISGSGRDTLYADSVK | |
| | GRFTISRDNAKTTLYLQMNSLRPEDTAVYYCTIG | |
| | GSLSVSSQGTLVTVSSGGGGSGGGSGGVYCGPE | |
| | FDESVGCMGGGGSGGGSGGGGSGGASSGAGGS | |
| | GGGSEVQLVESGGGLVQPGGSLKLSCAASGFTF | |
| | NKYAMNWVRQAPGKGLEWVARIRSKYNNYAT | |
| | YYADSVKDRFTISRDDSKNTAYLQMNNLKTEDT | |
| | AVYYCVRHGNFGNSYISYWAYWGQGTLVTVSS | |
| | GGGGSGGGGSGGGGSQTVVTQEPSLTVSPGGTV | |
| | TLTCGSSTGAVTSGNYPNWVQQKPGQAPRGLIG | |
| | GTKFLAPGTPARFSGSLLGGKAALTLSGVQPEDE | |
| | AEYYCVLWYSNRWVFGGGTKLTVLGGGGSDIQ | |
| | LTQSPSSLSASVGDRVSITCKASQDVSIAVAWYQ | |
| | QKPGKAPKLLIYSASYRYTGVPDRFSGSGSGTDF | |
| | TLTISSLQPEDFAVYYCQQHYITPLTFGAGTKVEI | |
| | KRTVAAPSVFIFPPSDEQLKSGTASVVCLLNNFY | |
| | PREAKVQWKVDNALQSGNSQESVTEQDSKDST | |
| | YSLSSTLTLSKADYEKHKVYACEVTHQGLSSPV | |
| | TKSFNRGEC | |
| PC30: HC | GGVDFCGLYHWPICYQGGGGSGGGGGSGGGGS | 242 |
| | GGASSGAGGSQVQLQQSGSELKKPGASVKVSCK | |
| | ASGYTFTNYGMNWVKQAPGQGLKWMGWINTY | |
| | TGEPTYTDDFKGRFAFSLDTSVSTAYLQISSLKA | |
| | DDTAVYFCARGGFGSSYWYFDVWGQGSLVTVS | |
| | SASTKGPSVFPLAPSSKSTSGGTAALGCLVKDYF | |
| | PEPVTVSWNSGALTSGVHTFPAVLQSSGLYSLSS | |
| | VVTVPSSSLGTQTYICNVNHKPSNTKVDKKVEP | |
| | KSC | |

[0179] In some embodiments, the isolated polypeptide or polypeptide complex comprises amino acid sequences according to SEQ ID NO: 76 and SEQ ID NO: 77. In some embodiments, the isolated polypeptide or polypeptide complex comprises amino acid sequences with at least 90% sequence identity to SEQ ID NO: 76 and SEQ ID NO: 77. In some embodiments, the isolated polypeptide or polypeptide complex comprises amino acid sequences with at least 95% sequence identity to SEQ ID NO: 76 and SEQ ID NO: 77. In some embodiments, the isolated polypeptide or polypeptide complex comprises amino acid sequences with at least 99% sequence identity to SEQ ID NO: 76 and SEQ ID NO: 77.

[0180] In some embodiments, the isolated polypeptide or polypeptide complex comprises amino acid sequences according to SEQ ID NO: 78 and SEQ ID NO: 79. In some embodiments, the isolated polypeptide or polypeptide complex comprises amino acid sequences with at least 90% sequence identity to SEQ ID NO: 78 and SEQ ID NO: 79. In some embodiments, the isolated polypeptide or polypeptide complex comprises amino acid sequences with at least 95% sequence identity to SEQ ID NO: 78 and SEQ ID NO: 79. In some embodiments, the isolated polypeptide or polypeptide complex comprises amino acid sequences with at least 99% sequence identity to SEQ ID NO: 78 and SEQ ID NO: 79.

[0181] In some embodiments, the isolated polypeptide or polypeptide complex comprises amino acid sequences according to SEQ ID NO: 80 and SEQ ID NO: 81. In some embodiments, the isolated polypeptide or polypeptide complex comprises amino acid sequences with at least 90% sequence identity to SEQ ID NO: 80 and SEQ ID NO: 81. In some embodiments, the isolated polypeptide or polypeptide complex comprises amino acid sequences with at least 95% sequence identity to SEQ ID NO: 80 and SEQ ID NO: 81. In some embodiments, the isolated polypeptide or polypeptide complex comprises amino acid sequences with at least 99% sequence identity to SEQ ID NO: 80 and SEQ ID NO: 81.

[0182] In some embodiments, the isolated polypeptide or polypeptide complex comprises amino acid sequences according to SEQ ID NO: 82 and SEQ ID NO: 83. In some embodiments, the isolated polypeptide or polypeptide complex comprises amino acid sequences with at least 90% sequence identity to SEQ ID NO: 82 and SEQ ID NO: 83. In some embodiments, the isolated polypeptide or polypeptide complex comprises amino acid sequences with at least 95% sequence identity to SEQ ID NO: 82 and SEQ ID NO: 83. In some embodiments, the isolated polypeptide or polypeptide complex comprises amino acid sequences with at least 99% sequence identity to SEQ ID NO: 82 and SEQ ID NO: 83.

[0183] In some embodiments, the isolated polypeptide or polypeptide complex comprises amino acid sequences according to SEQ ID NO: 84 and SEQ ID NO: 85. In some embodiments, the isolated polypeptide or polypeptide complex comprises amino acid sequences with at least 90% sequence identity to SEQ ID NO: 84 and SEQ ID NO: 85. In some embodiments, the isolated polypeptide or polypeptide complex comprises amino acid sequences with at least 95% sequence identity to SEQ ID NO: 84 and SEQ ID NO: 85. In some embodiments, the isolated polypeptide or polypeptide complex comprises amino acid sequences with at least 99% sequence identity to SEQ ID NO: 84 and SEQ ID NO: 85.

[0184] In some embodiments, the isolated polypeptide or polypeptide complex comprises amino acid sequences according to SEQ ID NO: 86 and SEQ ID NO: 87. In some embodiments, the isolated polypeptide or polypeptide complex comprises amino acid sequences with at least 90% sequence identity to SEQ ID NO: 86 and SEQ ID NO: 87. In some embodiments, the isolated polypeptide or polypeptide complex comprises amino acid sequences with at least 95% sequence identity to SEQ ID NO: 86 and SEQ ID NO: 87. In some embodiments, the isolated polypeptide or polypeptide complex comprises amino acid sequences with at least 99% sequence identity to SEQ ID NO: 86 and SEQ ID NO: 87.

[0185] In some embodiments, the isolated polypeptide or polypeptide complex comprises amino acid sequences according to SEQ ID NO: 88 and SEQ ID NO: 89. In some embodiments, the isolated polypeptide or polypeptide complex comprises amino acid sequences with at least 90% sequence identity to SEQ ID NO: 88 and SEQ ID NO: 89. In some embodiments, the isolated polypeptide or polypeptide complex comprises amino acid sequences with at least 95% sequence identity to SEQ ID NO: 88 and SEQ ID NO: 89. In some embodiments, the isolated polypeptide or polypeptide complex comprises amino acid sequences with at least 99% sequence identity to SEQ ID NO: 88 and SEQ ID NO: 89.

[0186] In some embodiments, the isolated polypeptide or polypeptide complex comprises amino acid sequences according to SEQ ID NO: 90 and SEQ ID NO: 91. In some embodiments, the isolated polypeptide or polypeptide complex comprises amino acid sequences with at least 90% sequence identity to SEQ ID NO: 90 and SEQ ID NO: 91. In some embodiments, the isolated polypeptide or polypeptide complex comprises amino acid sequences with at least 95% sequence identity to SEQ ID NO: 90 and SEQ ID NO: 91. In some embodiments, the isolated polypeptide or polypeptide complex comprises amino acid sequences with at least 99% sequence identity to SEQ ID NO: 90 and SEQ ID NO: 91.

[0187] In some embodiments, the isolated polypeptide or polypeptide complex comprises amino acid sequences according to SEQ ID NO: 92 and SEQ ID NO: 93. In some embodiments, the isolated polypeptide or polypeptide complex comprises amino acid sequences with at least 90% sequence identity to SEQ ID NO: 92 and SEQ ID NO: 93. In some embodiments, the isolated polypeptide or polypeptide complex comprises amino acid sequences with at least 95% sequence identity to SEQ ID NO: 92 and SEQ ID NO: 93. In some embodiments, the isolated polypeptide or polypeptide complex comprises amino acid sequences with at least 99% sequence identity to SEQ ID NO: 92 and SEQ ID NO: 93.

[0188] In some embodiments, the isolated polypeptide or polypeptide complex comprises amino acid sequences according to SEQ ID NO: 94 and SEQ ID NO: 95. In some embodiments, the isolated polypeptide or polypeptide complex comprises amino acid sequences with at least 90% sequence identity to SEQ ID NO: 94 and SEQ ID NO: 95. In some embodiments, the isolated polypeptide or polypeptide complex comprises amino acid sequences with at least 95% sequence identity to SEQ ID NO: 94 and SEQ ID NO: 95. In some embodiments, the isolated polypeptide or polypeptide complex comprises amino acid sequences with at least 99% sequence identity to SEQ ID NO: 94 and SEQ ID NO: 95.

[0189] In some embodiments, the isolated polypeptide or polypeptide complex comprises amino acid sequences according to SEQ ID NO: 96 and SEQ ID NO: 97. In some embodiments, the isolated polypeptide or polypeptide complex comprises amino acid sequences with at least 90% sequence identity to SEQ ID NO: 96 and SEQ ID NO: 97. In some embodiments, the isolated polypeptide or polypeptide complex comprises amino acid sequences with at least 95% sequence identity to SEQ ID NO: 96 and SEQ ID NO: 97. In some embodiments, the isolated polypeptide or polypeptide complex comprises amino acid sequences with at least 99% sequence identity to SEQ ID NO: 96 and SEQ ID NO: 97.

[0190] In some embodiments, the isolated polypeptide or polypeptide complex comprises amino acid sequences according to SEQ ID NO: 98 and SEQ ID NO: 99. In some embodiments, the isolated polypeptide or polypeptide complex comprises amino acid sequences with at least 90% sequence identity to SEQ ID NO: 98 and SEQ ID NO: 99. In some embodiments, the isolated polypeptide or polypeptide complex comprises amino acid sequences with at least 95% sequence identity to SEQ ID NO: 98 and SEQ ID NO: 99. In some embodiments, the isolated polypeptide or polypeptide complex comprises amino acid sequences with at least 99% sequence identity to SEQ ID NO: 98 and SEQ ID NO: 99.

[0191] In some embodiments, the isolated polypeptide or polypeptide complex comprises amino acid sequences according to SEQ ID NO: 100 and SEQ ID NO: 101. In some embodiments, the isolated polypeptide or polypeptide complex comprises amino acid sequences with at least 90% sequence identity to SEQ ID NO: 100 and SEQ ID NO: 101. In some embodiments, the isolated polypeptide or polypeptide complex comprises amino acid sequences with at least 95% sequence identity to SEQ ID NO: 100 and SEQ ID NO: 101. In some embodiments, the isolated polypeptide or polypeptide complex comprises amino acid sequences with at least 99% sequence identity to SEQ ID NO: 100 and SEQ ID NO: 101.

[0192] In some embodiments, the isolated polypeptide or polypeptide complex comprises amino acid sequences according to SEQ ID NO: 102 and SEQ ID NO: 103. In some embodiments, the isolated polypeptide or polypeptide complex comprises amino acid sequences with at least 90% sequence identity to SEQ ID NO: 102 and SEQ ID NO: 103. In some embodiments, the isolated polypeptide or polypeptide complex comprises amino acid sequences with at least 95% sequence identity to SEQ ID NO: 102 and SEQ ID NO: 103. In some embodiments, the isolated polypeptide or polypeptide complex comprises amino acid sequences with at least 99% sequence identity to SEQ ID NO: 102 and SEQ ID NO: 103.

[0193] In some embodiments, the isolated polypeptide or polypeptide complex comprises amino acid sequences according to SEQ ID NO: 104 and SEQ ID NO: 105. In some embodiments, the isolated polypeptide or polypeptide complex comprises amino acid sequences with at least 90% sequence identity to SEQ ID NO: 104 and SEQ ID NO: 105. In some embodiments, the isolated polypeptide or polypeptide complex comprises amino acid sequences with at least 95% sequence identity to SEQ ID NO: 104 and SEQ ID NO: 105. In some embodiments, the isolated polypeptide or polypeptide complex comprises amino acid sequences with at least 99% sequence identity to SEQ ID NO: 104 and SEQ ID NO: 105.

[0194] In some embodiments, the isolated polypeptide or polypeptide complex comprises amino acid sequences according to SEQ ID NO: 106 and SEQ ID NO: 107. In some embodiments, the isolated polypeptide or polypeptide complex comprises amino acid sequences with at least 90% sequence identity to SEQ ID NO: 106 and SEQ ID NO: 107. In some embodiments, the isolated polypeptide or polypeptide complex comprises amino acid sequences with at least 95% sequence identity to SEQ ID NO: 106 and SEQ ID NO: 107. In some embodiments, the isolated polypeptide or polypeptide complex comprises amino acid sequences with at least 99% sequence identity to SEQ ID NO: 106 and SEQ ID NO: 107.

[0195] In some embodiments, the isolated polypeptide or polypeptide complex comprises amino acid sequences according to SEQ ID NO: 108 and SEQ ID NO: 109. In some embodiments, the isolated polypeptide or polypeptide complex comprises amino acid sequences with at least 90% sequence identity to SEQ ID NO: 108 and SEQ ID NO: 109. In some embodiments, the isolated polypeptide or polypeptide complex comprises amino acid sequences with at least 95% sequence identity to SEQ ID NO: 108 and SEQ ID NO: 109. In some embodiments, the isolated polypeptide or polypeptide complex comprises amino acid sequences with at least 99% sequence identity to SEQ ID NO: 108 and SEQ ID NO: 109.

[0196] In some embodiments, the isolated polypeptide or polypeptide complex comprises amino acid sequences according to SEQ ID NO: 110 and SEQ ID NO: 111. In some embodiments, the isolated polypeptide or polypeptide complex comprises amino acid sequences with at least 90% sequence identity to SEQ ID NO: 110 and SEQ ID NO: 111. In some embodiments, the isolated polypeptide or polypeptide complex comprises amino acid sequences with at least 95% sequence identity to SEQ ID NO: 110 and SEQ ID NO: 111. In some embodiments, the isolated polypeptide or polypeptide complex comprises amino acid sequences with at least 99% sequence identity to SEQ ID NO: 110 and SEQ ID NO: 111.

[0197] In some embodiments, the isolated polypeptide or polypeptide complex comprises amino acid sequences according to SEQ ID NO: 112 and SEQ ID NO: 113. In some embodiments, the isolated polypeptide or polypeptide complex comprises amino acid sequences with at least 90% sequence identity to SEQ ID NO: 112 and SEQ ID NO: 113. In some embodiments, the isolated polypeptide or polypeptide complex comprises amino acid sequences with at least 95% sequence identity to SEQ ID NO: 112 and SEQ ID NO: 113. In some embodiments, the isolated polypeptide or polypeptide complex comprises amino acid sequences with at least 99% sequence identity to SEQ ID NO: 112 and SEQ ID NO: 113.

[0198] In some embodiments, the isolated polypeptide or polypeptide complex comprises amino acid sequences according to SEQ ID NO: 114 and SEQ ID NO: 115. In some embodiments, the isolated polypeptide or polypeptide complex comprises amino acid sequences with at least 90% sequence identity to SEQ ID NO: 114 and SEQ ID NO: 115. In some embodiments, the isolated polypeptide or polypeptide complex comprises amino acid sequences with at least 95% sequence identity to SEQ ID NO: 114 and SEQ ID NO: 115. In some embodiments, the isolated polypeptide or polypeptide complex comprises amino acid sequences with at least 99% sequence identity to SEQ ID NO: 114 and SEQ ID NO: 115.

[0199] In some embodiments, the isolated polypeptide or polypeptide complex comprises amino acid sequences according to SEQ ID NO: 116 and SEQ ID NO: 117. In some embodiments, the isolated polypeptide or polypeptide complex comprises amino acid sequences with at least 90% sequence identity to SEQ ID NO: 116 and SEQ ID NO: 117. In some embodiments, the isolated polypeptide or polypeptide complex comprises amino acid sequences with at least 95% sequence identity to SEQ ID NO: 116 and SEQ ID NO: 117. In some embodiments, the isolated polypeptide or polypeptide complex comprises amino acid sequences with at least 99% sequence identity to SEQ ID NO: 116 and SEQ ID NO: 117.

[0200] In some embodiments, the isolated polypeptide or polypeptide complex comprises amino acid sequences according to SEQ ID NO: 118 and SEQ ID NO: 119. In some embodiments, the isolated polypeptide or polypeptide complex comprises amino acid sequences with at least 90% sequence identity to SEQ ID NO: 118 and SEQ ID NO: 119. In some embodiments, the isolated polypeptide or polypeptide complex comprises amino acid sequences with at least 95% sequence identity to SEQ ID NO: 118 and SEQ ID NO: 119. In some embodiments, the isolated polypeptide or polypeptide complex comprises amino acid sequences with at least 99% sequence identity to SEQ ID NO: 118 and SEQ ID NO: 119.

[0201] In some embodiments, the isolated polypeptide or polypeptide complex comprises amino acid sequences according to SEQ ID NO: 120 and SEQ ID NO: 121. In some embodiments, the isolated polypeptide or polypeptide complex comprises amino acid sequences with at least 90% sequence identity to SEQ ID NO: 120 and SEQ ID NO: 121. In some embodiments, the isolated polypeptide or polypeptide complex comprises amino acid sequences with at least 95% sequence identity to SEQ ID NO: 120 and SEQ ID NO: 121. In some embodiments, the isolated polypeptide or polypeptide complex comprises amino acid sequences with at least 99% sequence identity to SEQ ID NO: 120 and SEQ ID NO: 121.

[0202] In some embodiments, the isolated polypeptide or polypeptide complex comprises amino acid sequences according to SEQ ID NO: 123 and SEQ ID NO: 124. In some embodiments, the isolated polypeptide or polypeptide complex comprises amino acid sequences with at least 90% sequence identity to SEQ ID NO: 123 and SEQ ID NO: 124. In some embodiments, the isolated polypeptide or polypeptide complex comprises amino acid sequences with at least 95% sequence identity to SEQ ID NO: 123 and SEQ ID NO: 124. In some embodiments, the isolated polypeptide or polypeptide complex comprises amino acid sequences with at least 99% sequence identity to SEQ ID NO: 123 and SEQ ID NO: 124.

[0203] In some embodiments, the isolated polypeptide or polypeptide complex comprises amino acid sequences according to SEQ ID NO: 125 and SEQ ID NO: 126. In some embodiments, the isolated polypeptide or polypeptide complex comprises amino acid sequences with at least 90% sequence identity to SEQ ID NO: 125 and SEQ ID NO: 126. In some embodiments, the isolated polypeptide or polypeptide complex comprises amino acid sequences with at least 95% sequence identity to SEQ ID NO: 125 and SEQ ID NO: 126. In some embodiments, the isolated polypeptide or polypeptide complex comprises amino acid sequences with at least 99% sequence identity to SEQ ID NO: 125 and SEQ ID NO: 126.

[0204] In some embodiments, the isolated polypeptide or polypeptide complex comprises amino acid sequences according to SEQ ID NO: 127 and SEQ ID NO: 128. In some embodiments, the isolated polypeptide or polypeptide complex comprises amino acid sequences with at least 90% sequence identity to SEQ ID NO: 127 and SEQ ID NO: 128. In some embodiments, the isolated polypeptide or polypeptide complex comprises amino acid sequences with at least 95% sequence identity to SEQ ID NO: 127 and SEQ ID NO: 128. In some embodiments, the isolated polypeptide or polypeptide complex comprises amino acid sequences with at least 99% sequence identity to SEQ ID NO: 127 and SEQ ID NO: 128.

[0205] In some embodiments, the isolated polypeptide or polypeptide complex comprises amino acid sequences according to SEQ ID NO: 129 and SEQ ID NO: 130. In some embodiments, the isolated polypeptide or polypeptide complex comprises amino acid sequences with at least 90% sequence identity to SEQ ID NO: 129 and SEQ ID NO: 130. In some embodiments, the isolated polypeptide or polypeptide complex comprises amino acid sequences with at least 95% sequence identity to SEQ ID NO: 129 and SEQ ID NO: 130. In some embodiments, the isolated polypeptide or polypeptide complex comprises amino acid sequences with at least 99% sequence identity to SEQ ID NO: 129 and SEQ ID NO: 130.

[0206] In some embodiments, the isolated polypeptide or polypeptide complex comprises amino acid sequences according to SEQ ID NO: 241 and SEQ ID NO: 131. In some embodiments, the isolated polypeptide or polypeptide complex comprises amino acid sequences with at least 90% sequence identity to SEQ ID NO: 241 and SEQ ID NO: 131. In some embodiments, the isolated polypeptide or polypeptide complex comprises amino acid sequences with at least 95% sequence identity to SEQ ID NO: 241 and SEQ ID NO: 131. In some embodiments, the isolated polypeptide or polypeptide complex comprises amino acid sequences with at least 99% sequence identity to SEQ ID NO: 241 and SEQ ID NO: 131.

[0207] In some embodiments, the isolated polypeptide or polypeptide complex comprises amino acid sequences according to SEQ ID NO: 132 and SEQ ID NO: 242. In some embodiments, the isolated polypeptide or polypeptide complex comprises amino acid sequences with at least 90% sequence identity to SEQ ID NO: 132 and SEQ ID NO: 242. In some embodiments, the isolated polypeptide or polypeptide complex comprises amino acid sequences with at least 95% sequence identity to SEQ ID NO: 132 and SEQ ID NO: 242. In some embodiments, the isolated polypeptide or polypeptide complex comprises amino acid sequences with at least 99% sequence identity to SEQ ID NO: 132 and SEQ ID NO: 242.

[0208] Polypeptides or polypeptide complexes, in some embodiments, comprise a sequence set forth in Table 6. In some embodiments, the sequence comprises at least or about 70%, 80%, 85%, 90%, 91%, 92%, 93%, 94%, 95%, 96%, 97%, 98%, 99%, or 100% sequence identity to any one of SEQ ID NOs: 74-132, 241-242. In some instances, the sequence comprises at least or about 95% homology to SEQ ID NOs: 74-132, 241-242. In some instances, the sequence comprises at least or about 97% homology to SEQ ID NOs: 74-132, 241-242. In some instances, the sequence comprises at least or about 99% homology to SEQ ID NOs: 74-132, 241-242. In some instances, the sequence comprises at least or about 100% homology to SEQ ID NOs: 74-132, 241-242. In some instances, the sequence comprises at least a portion having at least or about 10, 20, 30, 40, 50, 60, 70, 80, 90, 100, 110, 120, 130, 140, 150, 160, 170, 180, 190, 200, 210, or more than 210 amino acids of any one of SEQ ID NOs: 74, 77, 78, 81, 82, 84, 87, 89, 90, 93, 94, 97, 98, 100, 103, 105, 106, 108, 111, 113, 114, 116, 118, 120, 123, 126, 127, 130, 241, or 242. In some instances, the sequence comprises at least a portion having at least or about 10, 20, 30, 40, 50, 60, 70, 80, 90, 100, 110, 120, 130, 140, 150, 160, 170, 180, 190, 200, 210, 220, 230, 240, 250, 260, 270, 280, 290, 300, 310, 320, 330, 340, 350, 360, 370, 380, 390, 400, 410, 420, 430, 440, 450, or more than 450 amino acids of any one of SEQ ID NOs: 75, 76, 79, or 80. In some instances, the sequence comprises at least a portion having at least or about 10, 20, 30, 40, 50, 60, 70, 80, 90, 100, 110, 120, 130, 140, 150, 160, 170, 180, 190, 200, 210, 220, 230, 240, 250, 260, 270, 280, 290, 300, 310, 320, 330, 340, 350, 360, 370, 380, 390, 400, 410, 420, 430, 440, 450, 460, 470, 480, 490, 500, 510, 520, 530, 540, 550, 560, 570, 580, 590, 600, 610, 620, 630, 640, or more than 640 amino acids of any one of SEQ ID NOs: 83, 85, 86, 88, 91, 92, 95, 96, 99, 101, 102, 104, 107, 109, 112, 115, 117, 119, 121, 124, 125, 128, 129, 131, or 132.

[0209] As used herein, the term “percent (%) amino acid sequence identity” with respect to a sequence is defined as the percentage of amino acid residues in a candidate sequence that are identical with the amino acid residues in the specific sequence, after aligning the sequences and introducing gaps, if necessary, to achieve the maximum percent sequence identity, and not considering any conservative substitutions as part of the sequence identity. Alignment for purposes of determining percent amino acid sequence identity can be achieved in various ways that are within the skill in the art, for instance, using publicly available computer software such as EMBOSS MATCHER, EMBOSS WATER, EMBOSS STRETCHER, EMBOSS NEEDLE, EMBOSS LALIGN, BLAST, BLAST-2, ALIGN or Megalign (DNASTAR) software. Those skilled in the art can determine appropriate parameters for measuring alignment, including any algorithms needed to achieve maximal alignment over the full length of the sequences being compared. In situations where ALIGN-2 is employed for amino acid sequence comparisons, the % amino acid sequence identity of a given amino acid sequence A to, with, or against a given amino acid sequence B (which can alternatively be phrased as a given amino acid sequence A that has or comprises a certain % amino acid sequence identity to, with, or against a given amino acid sequence B) is calculated as follows: 100 times the fraction X/Y, where X is the number of amino acid residues scored as identical matches by the sequence alignment program ALIGN-2 in that program's alignment of A and B, and where Y is the total number of amino acid residues in B. It will be appreciated that where the length of amino acid sequence A is not equal to the length of amino acid sequence B, the % amino acid sequence identity of A to B will not equal the % amino acid sequence identity of B to A. Unless specifically stated otherwise, all % amino acid sequence identity values used herein are obtained as described in the immediately preceding paragraph using the ALIGN-2 computer program.

[0210] Disclosed herein, in some embodiments, are isolated polypeptides or polypeptide complexes comprising a structural arrangement according to Configuration 1:

wherein the polypeptide complex comprises a single chain variable fragment (scFv) comprising a light chain variable domain and a heavy chain variable domain, wherein the scFv further comprises a peptide that impairs binding of the scFv to an effector cell antigen and the peptide is linked to a N-terminus of the heavy chain variable domain of the scFv with a linking moiety that is a substrate for a tumor specific protease, and the peptide further comprises a half-life extending molecule; and a Fab that binds to TROP2, wherein the Fab comprises a Fab light chain polypeptide and a Fab heavy chain polypeptide, wherein the Fab heavy chain polypeptide is linked to a C terminus of the light chain variable domain of the scFv, and wherein the Fab further comprises P₂ and L₂, wherein P₂ comprises a peptide that impairs binding to TROP2; and L₂ comprises a linking moiety that connects the Fab light chain polypeptide to P₂ and is a substrate for a tumor specific protease.

[0211] Disclosed herein, in some embodiments, are isolated polypeptides or polypeptide complexes comprising a structural arrangement according to Configuration 2:

wherein the polypeptide complex comprises a single chain variable fragment (scFv) comprising a light chain variable domain and a heavy chain variable domain, wherein the scFv further comprises a peptide that impairs binding of the scFv to an effector cell antigen and the peptide is linked to a N-terminus of the heavy chain variable domain of the scFv with a linking moiety that is a substrate for a tumor specific protease, and the peptide further comprises a half-life extending molecule; and a Fab that binds to TROP2, wherein the Fab comprises a Fab light chain polypeptide and a Fab heavy chain polypeptide, wherein the Fab light chain polypeptide is linked to a C terminus of the light chain variable domain of the scFv, and wherein the Fab further comprises P₂ and L₂, wherein P₂ comprises a peptide that impairs binding to TROP2; and L₂ comprises a linking moiety that connects the Fab heavy chain polypeptide to P₂ and is a substrate for a tumor specific protease.

[0212] Disclosed herein, in some embodiments, are isolated polypeptides or polypeptide complexes comprising a structural arrangement according to Configuration 3:

wherein the isolated polypeptide or polypeptide complex comprises a single chain variable fragment (scFv) comprising a light chain variable domain and a heavy chain variable domain, wherein the scFv is linked to a peptide that impairs binding of the scFv to an effector cell antigen and the peptide is linked to the light chain variable domain of the scFv with a linking moiety that is a substrate for a tumor specific protease, and the peptide is further linked to a half-life extending molecule; and a Fab that binds to TROP2, wherein the Fab comprises a Fab light chain polypeptide chain and a Fab heavy chain polypeptide chain, and wherein the Fab heavy chain polypeptide chain is linked to a C terminus of the heavy chain variable domain of the scFv.

[0213] Disclosed herein, in some embodiments, are isolated polypeptides or polypeptide complexes comprising a structural arrangement according to Configuration 4:

wherein the isolated polypeptide or polypeptide complex comprises a single chain variable fragment (scFv) comprising a light chain variable domain and a heavy chain variable domain, wherein the scFv is linked to a peptide (P₁) that impairs binding of the scFv to an effector cell antigen and P₁ is linked to a N-terminus of the light chain variable domain of the scFv with a linking moiety that is a substrate for a tumor specific protease, and P₁ is further linked to a half-life extending molecule; and a Fab that binds to TROP2, wherein the Fab comprises a Fab light chain polypeptide and a Fab heavy chain polypeptide, wherein the Fab light chain polypeptide is linked to a C terminus of the heavy chain variable domain of the scFv, and wherein the Fab is linked to P₂ and L₂, wherein P₂ comprises a peptide that impairs binding to TROP2; and L₂ comprises a linking moiety that connects the Fab heavy chain polypeptide to P₂ and is a substrate for a tumor specific protease.

[0214] Disclosed herein, in some embodiments, are isolated polypeptides or polypeptide complexes comprising a structural arrangement according to Configuration 5:

wherein the isolated polypeptide or polypeptide complex comprises a single chain variable fragment (scFv) comprising a light chain variable domain and a heavy chain variable domain, wherein the scFv is further linked to a peptide that impairs binding of the scFv to an effector cell antigen and the peptide is linked to a N-terminus of the light chain variable domain of the scFv with a linking moiety that is a substrate for a tumor specific protease, and the peptide is further linked to a half-life extending molecule; and a Fab that binds to TROP2, wherein the Fab comprises a Fab light chain polypeptide and a Fab heavy chain polypeptide, wherein the Fab light chain polypeptide is linked to a C terminus of the heavy chain variable domain of the scFv.

[0215] Disclosed herein, in some embodiments, are isolated polypeptides or polypeptide complexes comprising a structural arrangement according to Configuration 6:

wherein the isolated polypeptide or polypeptide complex comprises a single chain variable fragment (scFv) comprising a light chain variable domain and a heavy chain variable domain, wherein the scFv is linked to a peptide (P₁) that impairs binding of the scFv to an effector cell antigen and P₁ is linked to a N-terminus of the heavy chain variable domain of the scFv with a linking moiety (L₁) that is a substrate for a tumor specific protease, and P₁ is further linked to a half-life extending molecule; and a Fab that binds to TROP2, wherein the Fab comprises a Fab light chain polypeptide and a Fab heavy chain polypeptide, wherein the Fab heavy chain polypeptide is linked to a C terminus of the light chain variable domain of the scFv, and wherein the Fab is linked to P₂ and L₂, wherein P₂ comprises a peptide that impairs binding to TROP2; and L₂ comprises a linking moiety that connects the Fab light chain polypeptide to P₂ and is a substrate for a tumor specific protease.

[0216] Disclosed herein, in some embodiments, are isolated polypeptides or polypeptide complexes comprising a structural arrangement according to Configuration 7:

wherein the isolated polypeptide or polypeptide complex comprises a single chain variable fragment (scFv) comprising a light chain variable domain and a heavy chain variable domain, wherein the scFv is linked to a peptide that impairs binding of the scFv to an effector cell antigen and the peptide is linked to the heavy chain variable domain of the scFv with a linking moiety that is a substrate for a tumor specific protease, and the peptide is further linked to a half-life extending molecule; and a Fab that binds to TROP2, wherein the Fab comprises a Fab light chain polypeptide chain and a Fab heavy chain polypeptide chain, and wherein the Fab heavy chain polypeptide chain is linked to a C terminus of the light chain variable domain of the scFv.

[0217] Disclosed herein, in some embodiments, are isolated polypeptides or polypeptide complexes comprising a structural arrangement according to Configuration 8:

wherein the isolated polypeptide or polypeptide complex comprises a single chain variable fragment (scFv) comprising a light chain variable domain and a heavy chain variable domain, wherein the scFv is linked to a peptide that impairs binding of the scFv to an effector cell antigen and the peptide is linked to a N-terminus of the heavy chain variable domain of the scFv with a linking moiety that is a substrate for a tumor specific protease, and the peptide is further linked to a half-life extending molecule; and a Fab that binds to TROP2, wherein the Fab comprises a Fab light chain polypeptide and a Fab heavy chain polypeptide, wherein the Fab light chain polypeptide is linked to a C terminus of the light chain variable domain of the scFv.

[0218] Disclosed herein, in some embodiments, are isolated polypeptides or polypeptide complexes comprising a structural arrangement according to Configuration 9:

wherein the isolated polypeptide or polypeptide complex comprises a Fab that binds to TROP2, the Fab comprising a Fab light chain polypeptide and a Fab heavy chain polypeptide, wherein the Fab is linked to a peptide (P₁) that impairs binding of the Fab to TROP2 and P₁ is linked to a N terminus of the Fab light chain polypeptide with a linking moiety (L₁) that is a substrate for a tumor specific protease, and the P₁ is further linked to a half-life extending molecule; and a single chain variable fragment (scFv) that binds to an effector cell antigen, the scFv comprising a light chain variable domain and a heavy chain variable domain, wherein the heavy chain variable domain of the scFv is linked to an N terminus of the Fab heavy chain polypeptide, wherein the scFv is linked to P₂ and L₂, wherein P₂ comprises a peptide that impairs binding of the scFv to the effector cell antigen, and L₂ comprises a linking moiety that connects the light chain variable domain of the scFv to P₂ and is a substrate for a tumor specific protease.

[0219] Disclosed herein, in some embodiments, are isolated polypeptides or polypeptide complexes comprising a structural arrangement according to Configuration 10:

wherein the isolated polypeptide or polypeptide complex comprises a Fab that binds to TROP2, the Fab comprising a Fab light chain polypeptide and a Fab heavy chain polypeptide, wherein the Fab is linked to a peptide that impairs binding of the Fab to TROP2 and the peptide is linked to a N terminus of the Fab light chain polypeptide with a linking moiety that is a substrate for a tumor specific protease, and the peptide is further linked to half-life extending molecule; and a single chain variable fragment (scFv) that binds to an effector cell antigen, the scFv comprising a light chain variable domain and a heavy chain variable domain, wherein the heavy chain variable domain of the scFv is linked to an N terminus of the Fab heavy chain polypeptide.

[0220] Disclosed herein, in some embodiments, are isolated polypeptides or polypeptide complexes comprising a structural arrangement according to Configuration 11:

wherein the isolated polypeptide or polypeptide complex comprises a Fab that binds to TROP2, the Fab comprising a Fab light chain polypeptide and a Fab heavy chain polypeptide, wherein the Fab is linked to a peptide (P₁) that impairs binding of the Fab to TROP2 and P₁ is linked to a N terminus of the Fab heavy chain polypeptide with a linking moiety (L₁) that is a substrate for a tumor specific protease, and P₁ is further linked to a half-life extending molecule; and a single chain variable fragment (scFv) that binds to an effector cell antigen, the scFv comprising a light chain variable domain and a heavy chain variable domain, wherein the heavy chain variable domain of the scFv is linked to an N terminus of the Fab light chain polypeptide, wherein the scFv further is linked to P₂ and L₂, wherein P₂ comprises a peptide that impairs binding of the scFv to the effector cell antigen, and L₂ comprises a linking moiety that connects the light chain variable domain of the scFv to P₂ and is a substrate for a tumor specific protease.

[0221] Disclosed herein, in some embodiments, are isolated polypeptides or polypeptide complexes comprising a structural arrangement according to Configuration 12:

wherein the isolated polypeptide or polypeptide complex comprises a Fab that binds to TROP2, the Fab comprising a Fab light chain polypeptide and a Fab heavy chain polypeptide, wherein the Fab is linked to a peptide that impairs binding of the Fab to TROP2 and the peptide is linked to a N terminus of the Fab heavy chain polypeptide with a linking moiety that is a substrate for a tumor specific protease, and the peptide is further linked to a half-life extending molecule; and a single chain variable fragment (scFv) that binds to an effector cell antigen, the scFv comprising a light chain variable domain and a heavy chain variable domain, wherein the heavy chain variable domain of the scFv is linked to an N terminus of the Fab light chain polypeptide.

[0222] Disclosed herein, in some embodiments, are isolated polypeptides or polypeptide complexes comprising a structural arrangement according to Configuration 13:

wherein the isolated polypeptide or polypeptide complex comprises a Fab that binds to TROP2, the Fab comprising a Fab light chain polypeptide and a Fab heavy chain polypeptide, wherein the Fab is linked to a peptide (P₁) that impairs binding of the Fab to TROP2 and P₁ is linked to a N terminus of the Fab light chain polypeptide with a linking moiety (L₁) that is a substrate for a tumor specific protease, and P₁ is further linked to a half-life extending molecule; and a single chain variable fragment (scFv) that binds to an effector cell antigen, the scFv comprising a light chain variable domain and a heavy chain variable domain, wherein the light chain variable domain of the scFv is linked to an N terminus of the Fab heavy chain polypeptide, wherein the scFv is linked to P₂ and L₂, wherein P₂ comprises a peptide that impairs binding of the scFv to the effector cell antigen, and L₂ comprises a linking moiety that connects the heavy chain variable domain of the scFv to P₂ and is a substrate for a tumor specific protease.

[0223] Disclosed herein, in some embodiments, are isolated polypeptides or polypeptide complexes comprising a structural arrangement according to Configuration 14:

wherein the isolated polypeptide or polypeptide complex comprises a Fab that binds to TROP2, the Fab comprising a Fab light chain polypeptide and a Fab heavy chain polypeptide, wherein the Fab is linked to a peptide that impairs binding of the Fab to TROP2 and the peptide is linked to a N terminus of the Fab light chain polypeptide with a linking moiety that is a substrate for a tumor specific protease, and the peptide is further linked to a half-life extending molecule; and a single chain variable fragment (scFv) that binds to an effector cell antigen, the scFv comprising a light chain variable domain and a heavy chain variable domain, wherein the light chain variable domain of the scFv is linked to an N terminus of the Fab heavy chain polypeptide.

[0224] Disclosed herein, in some embodiments, are isolated polypeptides or polypeptide complexes comprising a structural arrangement according to Configuration 15:

wherein the isolated polypeptide or polypeptide complex comprises a Fab that binds to TROP2, the Fab comprising a Fab light chain polypeptide and a Fab heavy chain polypeptide, wherein the Fab is linked to a (P₁) that impairs binding of the Fab to TROP2 and P₁ is linked to a N terminus of the Fab heavy chain polypeptide with a linking moiety (L₁) that is a substrate for a tumor specific protease, and P₁ is further linked to a half-life extending molecule; and a single chain variable fragment (scFv) that binds to an effector cell antigen, the scFv comprising a light chain variable domain and a heavy chain variable domain, wherein the light chain variable domain of the scFv is linked to an N terminus of the Fab light chain polypeptide, wherein the scFv is linked to P₂ and L₂, wherein P₂ comprises a peptide that impairs binding of the scFv to the effector cell antigen, and L₂ comprises a linking moiety that connects the heavy chain variable domain of the scFv to P₂ and is a substrate for a tumor specific protease.

[0225] Disclosed herein, in some embodiments, are isolated polypeptides or polypeptide complexes comprising a structural arrangement according to Configuration 16:

wherein the isolated polypeptide or polypeptide complex comprises a Fab that binds to TROP2, the Fab comprising a Fab light chain polypeptide and a Fab heavy chain polypeptide, wherein the Fab is linked to a peptide that impairs binding of the Fab to TROP2 and the peptide is linked to a N terminus of the Fab heavy chain polypeptide with a linking moiety that is a substrate for a tumor specific protease, and the peptide is further linked to a half-life extending molecule; and a single chain variable fragment (scFv) that binds to an effector cell antigen, the scFv comprising a light chain variable domain and a heavy chain variable domain, wherein the light chain variable domain of the scFv is linked to an N terminus of the Fab light chain polypeptide.

### Polynucleotides Encoding Polypeptides or Polypeptide Complexes

[0226] Disclosed herein, in some embodiments, are isolated recombinant nucleic acid molecules encoding polypeptides or polypeptide complexes as disclosed herein. In some embodiments, the polypeptides or polypeptide complexes comprise an antibody or an antibody fragment. In some embodiments, the polypeptides or polypeptide complexes comprise a Fab and a single chain variable fragment (scFv).

[0227] Disclosed herein, in some embodiments, are isolated recombinant nucleic acid molecules encoding polypeptides or polypeptide complexes according to Formula I:

A₂-A₁-L₁-P₁-H₁ (Formula I)

wherein: A₁ comprises a first antigen recognizing molecule that binds to an effector cell antigen; P₁ comprises a peptide that binds to A₁; L₁ comprises a linking moiety that connects A₁ to P₁ and is a substrate for a tumor specific protease; H₁ comprises a half-life extending molecule; and A₂ comprises a second antigen recognizing molecule that binds to TROP2.

[0228] Disclosed herein, in some embodiments, are isolated recombinant nucleic acid molecules encoding polypeptides or polypeptide complexes according to Formula I:

A₂-A₁-L₁-P₁-H₁ (Formula I)

wherein: A₁ is a first antigen recognizing molecule that binds to an effector cell antigen; P₁ is a peptide that binds to A₁; L₁ is a linking moiety that connects A₁ to P₁ and is a substrate for a tumor specific protease; H₁ is a half-life extending molecule; and A₂ is a second antigen recognizing molecule that binds to TROP2.

[0229] Disclosed herein, in some embodiments, are isolated recombinant nucleic acid molecules encoding polypeptides or polypeptide complexes comprising Formula I:

A₂-A₁-L₁-P₁-H₁ (Formula I)

wherein: A₁ comprises a first antigen recognizing molecule that binds to an effector cell antigen; P₁ comprises a peptide that binds to A₁; L₁ comprises a linking moiety that connects A₁ to P₁ and is a substrate for a tumor specific protease; H₁ comprises a half-life extending molecule; and A₂ comprises a second antigen recognizing molecule that binds to TROP2.

[0230] Disclosed herein, in some embodiments, are isolated recombinant nucleic acid molecules encoding polypeptides or polypeptide complexes comprising Formula I:

A₂-A₁-L₁-P₁-H₁ (Formula I)

wherein: A₁ is a first antigen recognizing molecule that binds to an effector cell antigen; P₁ is a peptide that binds to A₁; L₁ is a linking moiety that connects A₁ to P₁ and is a substrate for a tumor specific protease; H₁ is a half-life extending molecule; and A₂ is a second antigen recognizing molecule that binds to TROP2.

[0231] Disclosed herein, in some embodiments, are isolated recombinant nucleic acid molecules encoding polypeptides or polypeptide complexes according to Formula Ia:

P₂-L₂-A₂-A₁-L₁-P₁-H₁ (Formula Ia).

[0232] Disclosed herein, in some embodiments, are isolated recombinant nucleic acid molecules encoding polypeptides or polypeptide complexes according to Formula II:

L₁ₐ-P₁ₐ-H₁ₐ (Formula II)

wherein: L₁ₐ comprises a tumor specific protease-cleaved linking moiety that when uncleaved connects P₁ₐ to a first antigen recognizing molecule that binds to an effector cell antigen and the first antigen recognizing molecule is connected to a second antigen recognizing molecule that binds to TROP2; P₁ₐ comprises a peptide that binds to the first antigen recognizing molecule when L₁ₐ is uncleaved; and H₁ₐ comprises a half-life extending molecule.

[0233] Disclosed herein, in some embodiments, are isolated recombinant nucleic acid molecules encoding polypeptides or polypeptide complexes comprising Formula II:

L₁ₐ-P₁ₐ-H₁ₐ (Formula II)

wherein: L₁ₐ comprises a tumor specific protease-cleaved linking moiety that when uncleaved connects P₁ₐ to a first antigen recognizing molecule that binds to an effector cell antigen and the first antigen recognizing molecule is connected to a second antigen recognizing molecule that binds to TROP2; P₁ₐ comprises a peptide that binds to the first antigen recognizing molecule when L₁ₐ is uncleaved; and H₁ₐ comprises a half-life extending molecule.

[0234] Disclosed herein, in some embodiments, are isolated recombinant nucleic acid molecules encoding polypeptides or polypeptide complexes according to Formula II:

L₁ₐ-P₁ₐ-H₁ₐ (Formula II)

wherein: L₁ₐ is a tumor specific protease-cleaved linking moiety that when uncleaved connects P₁ₐ to a first antigen recognizing molecule that binds to an effector cell antigen and the first antigen recognizing molecule is connected to a second antigen recognizing molecule that binds to TROP2; P₁ₐ is a peptide that binds to the first antigen recognizing molecule when L₁ₐ is uncleaved; and H₁ₐ is a half-life extending molecule.

[0235] Disclosed herein, in some embodiments, are isolated recombinant nucleic acid molecules encoding polypeptides or polypeptide complexes comprising Formula II:

L₁ₐ-P₁ₐ-H₁ₐ (Formula II)

wherein: L₁ₐ is a tumor specific protease-cleaved linking moiety that when uncleaved connects P₁ₐ to a first antigen recognizing molecule that binds to an effector cell antigen and the first antigen recognizing molecule is connected to a second antigen recognizing molecule that binds to TROP2; P₁ₐ is a peptide that binds to the first antigen recognizing molecule when L₁ₐ is uncleaved; and H₁ₐ is a half-life extending molecule.

[0236] Disclosed herein, in some embodiments, are isolated nucleic acid molecules encoding polypeptides or polypeptide complexes comprising a structural arrangement according to Configuration 1:

wherein the polypeptide complex comprises a single chain variable fragment (scFv) comprising a light chain variable domain and a heavy chain variable domain, wherein the scFv further comprises a peptide that impairs binding of the scFv to an effector cell antigen and the peptide is linked to a N-terminus of the heavy chain variable domain of the scFv with a linking moiety that is a substrate for a tumor specific protease, and the peptide further comprises a half-life extending molecule; and a Fab that binds to TROP2, wherein the Fab comprises a Fab light chain polypeptide and a Fab heavy chain polypeptide, wherein the Fab heavy chain polypeptide is linked to a C terminus of the light chain variable domain of the scFv, and wherein the Fab further comprises P₂ and L₂, wherein P₂ comprises a peptide that impairs binding to TROP2; and L₂ comprises a linking moiety that connects the Fab light chain polypeptide to P₂ and is a substrate for a tumor specific protease.

[0237] Disclosed herein, in some embodiments, are isolated nucleic acid molecules encoding polypeptides or polypeptide complexes comprising a structural arrangement according to Configuration 2:

wherein the polypeptide complex comprises a single chain variable fragment (scFv) comprising a light chain variable domain and a heavy chain variable domain, wherein the scFv further comprises a peptide that impairs binding of the scFv to an effector cell antigen and the peptide is linked to a N-terminus of the heavy chain variable domain of the scFv with a linking moiety that is a substrate for a tumor specific protease, and the peptide further comprises a half-life extending molecule; and a Fab that binds to TROP2, wherein the Fab comprises a Fab light chain polypeptide and a Fab heavy chain polypeptide, wherein the Fab light chain polypeptide is linked to a C terminus of the light chain variable domain of the scFv, and wherein the Fab further comprises P₂ and L₂, wherein P₂ comprises a peptide that impairs binding to TROP2; and L₂ comprises a linking moiety that connects the Fab heavy chain polypeptide to P₂ and is a substrate for a tumor specific protease.

### Pharmaceutical Compositions

[0238] Disclosed herein, in some embodiments, are pharmaceutical compositions comprising: (a) the isolated polypeptides or polypeptide complexes as disclosed herein; and (b) a pharmaceutically acceptable excipient.

[0239] In some embodiments, the pharmaceutical composition comprises (a) isolated polypeptides or polypeptide complexes according to Formula I:

A₂-A₁-L₁-P₁-H₁ (Formula I)

wherein: A₁ comprises a first antigen recognizing molecule that binds to an effector cell antigen; P₁ comprises a peptide that binds to A₁; L₁ comprises a linking moiety that connects A₁ to P₁ and is a substrate for a tumor specific protease; H₁ comprises a half-life extending molecule; and A₂ comprises a second antigen recognizing molecule that binds to TROP2; and (b) a pharmaceutically acceptable excipient.

[0240] In some embodiments, the pharmaceutical composition comprises (a) isolated polypeptides or polypeptide complexes according to Formula I:

A₂-A₁-L₁-P₁-H₁ (Formula I)

wherein: A₁ is a first antigen recognizing molecule that binds to an effector cell antigen; P₁ is a peptide that binds to A₁; L₁ is a linking moiety that connects A₁ to P₁ and is a substrate for a tumor specific protease; H₁ is a half-life extending molecule; and A₂ is a second antigen recognizing molecule that binds to TROP2; and (b) a pharmaceutically acceptable excipient.

[0241] In some embodiments, the pharmaceutical composition comprises (a) isolated polypeptides or polypeptide complexes comprising Formula I:

A₂-A₁-L₁-P₁-H₁ (Formula I)

wherein: A₁ comprises a first antigen recognizing molecule that binds to an effector cell antigen; P₁ comprises a peptide that binds to A₁; L₁ comprises a linking moiety that connects A₁ to P₁ and is a substrate for a tumor specific protease; H₁ comprises a half-life extending molecule; and A₂ comprises a second antigen recognizing molecule that binds to TROP2; and (b) a pharmaceutically acceptable excipient.

[0242] In some embodiments, the pharmaceutical composition comprises (a) isolated polypeptides or polypeptide complexes comprising Formula I:

A₂-A₁-L₁-P₁-H₁ (Formula I)

wherein: A₁ is a first antigen recognizing molecule that binds to an effector cell antigen; P₁ is a peptide that binds to A₁; L₁ is a linking moiety that connects A₁ to P₁ and is a substrate for a tumor specific protease; H₁ is a half-life extending molecule; and A₂ is a second antigen recognizing molecule that binds to TROP2; and (b) a pharmaceutically acceptable excipient.

[0243] In some embodiments, the pharmaceutical composition comprises (a) isolated polypeptides or polypeptide complexes according to Formula Ia:

P₂-L₂-A₂-A₁-L₁-P₁-H₁ (Formula Ia);

and (b) a pharmaceutically acceptable excipient.

[0244] In some embodiments, the pharmaceutical composition comprises (a) isolated polypeptides or polypeptide complexes according to Formula II:

L₁ₐ-P₁ₐ-H₁ₐ (Formula II)

wherein: L₁ₐ comprises a tumor specific protease-cleaved linking moiety that when uncleaved connects P₁ₐ to a first antigen recognizing molecule that binds to an effector cell antigen and the first antigen recognizing molecule is connected to a second antigen recognizing molecule that binds to TROP2; P₁ₐ comprises a peptide that binds to the first antigen recognizing molecule when L₁ₐ is uncleaved; and H₁ₐ comprises a half-life extending molecule; and (b) a pharmaceutically acceptable excipient.

[0245] In some embodiments, the pharmaceutical composition comprises (a) isolated polypeptides or polypeptide complexes comprising Formula II:

L₁ₐ-P₁ₐ-H₁ₐ (Formula II)

wherein: L₁ₐ comprises a tumor specific protease-cleaved linking moiety that when uncleaved connects P₁ₐ to a first antigen recognizing molecule that binds to an effector cell antigen and the first antigen recognizing molecule is connected to a second antigen recognizing molecule that binds to TROP2; P₁ₐ comprises a peptide that binds to the first antigen recognizing molecule when L₁ₐ is uncleaved; and H₁ₐ comprises a half-life extending molecule; and (b) a pharmaceutically acceptable excipient.

[0246] In some embodiments, the pharmaceutical composition comprises (a) isolated polypeptides or polypeptide complexes according to Formula II:

L₁ₐ-P₁ₐ-H₁ₐ (Formula II)

wherein: L₁ₐ is a tumor specific protease-cleaved linking moiety that when uncleaved connects P₁ₐ to a first antigen recognizing molecule that binds to an effector cell antigen and the first antigen recognizing molecule is connected to a second antigen recognizing molecule that binds to TROP2; P₁ₐ is a peptide that binds to the first antigen recognizing molecule when L₁ₐ is uncleaved; and H₁ₐ is a half-life extending molecule; and (b) a pharmaceutically acceptable excipient.

[0247] In some embodiments, the pharmaceutical composition comprises (a) isolated polypeptides or polypeptide complexes comprising Formula II:

L₁ₐ-P₁ₐ-H₁ₐ (Formula II)

wherein: L₁ₐ is a tumor specific protease-cleaved linking moiety that when uncleaved connects P₁ₐ to a first antigen recognizing molecule that binds to an effector cell antigen and the first antigen recognizing molecule is connected to a second antigen recognizing molecule that binds to TROP2; P₁ₐ is a peptide that binds to the first antigen recognizing molecule when L₁ₐ is uncleaved; and H₁ₐ is a half-life extending molecule; and (b) a pharmaceutically acceptable excipient.

[0248] Disclosed herein, in some embodiments, the pharmaceutical composition comprises (a) isolated polypeptides or polypeptide complexes comprising a structural arrangement according to Configuration 1:

wherein the polypeptide complex comprises a single chain variable fragment (scFv) comprising a light chain variable domain and a heavy chain variable domain, wherein the scFv further comprises a peptide that impairs binding of the scFv to an effector cell antigen and the peptide is linked to a N-terminus of the heavy chain variable domain of the scFv with a linking moiety that is a substrate for a tumor specific protease, and the peptide further comprises a half-life extending molecule; and a Fab that binds to TROP2, wherein the Fab comprises a Fab light chain polypeptide and a Fab heavy chain polypeptide, wherein the Fab heavy chain polypeptide is linked to a C terminus of the light chain variable domain of the scFv, and wherein the Fab further comprises P₂ and L₂, wherein P₂ comprises a peptide that impairs binding to TROP2; and L₂ comprises a linking moiety that connects the Fab light chain polypeptide to P₂ and is a substrate for a tumor specific protease; and (b) a pharmaceutically acceptable excipient.

[0249] Disclosed herein, in some embodiments, the pharmaceutical composition comprises (a) isolated polypeptides or polypeptide complexes comprising a structural arrangement according to Configuration 2:

wherein the polypeptide complex comprises a single chain variable fragment (scFv) comprising a light chain variable domain and a heavy chain variable domain, wherein the scFv further comprises a peptide that impairs binding of the scFv to an effector cell antigen and the peptide is linked to a N-terminus of the heavy chain variable domain of the scFv with a linking moiety that is a substrate for a tumor specific protease, and the peptide further comprises a half-life extending molecule; and a Fab that binds to TROP2, wherein the Fab comprises a Fab light chain polypeptide and a Fab heavy chain polypeptide, wherein the Fab light chain polypeptide is linked to a C terminus of the light chain variable domain of the scFv, and wherein the Fab further comprises P₂ and L₂, wherein P₂ comprises a peptide that impairs binding to TROP2; and L₂ comprises a linking moiety that connects the Fab heavy chain polypeptide to P₂ and is a substrate for a tumor specific protease; and (b) a pharmaceutically acceptable excipient.

[0250] In some embodiments, the isolated polypeptide or polypeptide complex further comprises a detectable label, a therapeutic agent, or a pharmacokinetic modifying moiety. In some embodiments, the detectable label comprises a fluorescent label, a radiolabel, an enzyme, a nucleic acid probe, or a contrast agent.

[0251] For administration to a subject, the isolated polypeptide or polypeptide complex as disclosed herein, may be provided in a pharmaceutical composition together with one or more pharmaceutically acceptable carriers or excipients. The term “pharmaceutically acceptable carrier” includes, but is not limited to, any carrier that does not interfere with the effectiveness of the biological activity of the ingredients and that is not toxic to the patient to whom it is administered. Examples of suitable pharmaceutical carriers are well known in the art and include phosphate buffered saline solutions, water, emulsions, such as oil/water emulsions, various types of wetting agents, sterile solutions etc. Such carriers can be formulated by conventional methods and can be administered to the subject at a suitable dose. Preferably, the compositions are sterile. These compositions may also contain adjuvants such as preservative, emulsifying agents and dispersing agents. Prevention of the action of microorganisms may be ensured by the inclusion of various antibacterial and antifungal agents.

[0252] The pharmaceutical composition may be in any suitable form, (depending upon the desired method of administration). It may be provided in unit dosage form, may be provided in a sealed container and may be provided as part of a kit. Such a kit may include instructions for use. It may include a plurality of said unit dosage forms.

[0253] The pharmaceutical composition may be adapted for administration by any appropriate route, including a parenteral (e.g., subcutaneous, intramuscular, or intravenous) route. Such compositions may be prepared by any method known in the art of pharmacy, for example by mixing the active ingredient with the carrier(s) or excipient(s) under sterile conditions.

[0254] Dosages of the substances of the present disclosure can vary between wide limits, depending upon the disease or disorder to be treated, the age and condition of the individual to be treated, etc. and a physician will ultimately determine appropriate dosages to be used.

Peptides that Impair Binding of Anti-TROP2 Binding Domains to TROP2

[0255] Disclosed herein are isolated polypeptide or polypeptide complexes comprising an anti-TROP2 binding domain that is linked to a peptide that impairs binding of the anti-TROP2 binding to TROP2 wherein the peptide comprises an amino acid sequence according to X₁-X₂-X₃-X₄-C-X₆-X₇-X₈-X₉-X₁₀-C-X₁₂-X₁₃-X₁₄ and X₁ is selected from N, D, S, Y, A, F, H, T, L, and V; X₂ is selected from S, T, D, A, H, V, Y, N, F, I, and L; X₃ is selected from L, I, and V; X₄ is selected from F, L, V, M, W, I, Y, and H; X₆ is selected from V, F, L, I, and W; X₇ is selected from K, R, Q, N, H, and M; X₈ is selected from N and K; X₉ is selected from L, V, and I; X₁₀ is selected from Y, W, F, Q, and L; X₁₂ is selected from W and V; X₁₃ is selected from I, N, H, T, V, Y, and D; X₁₄ is selected from D, V, A, S, I, T, N, Y, H, and P; or the peptide comprises an amino acid according to J₁-J₂-J₃-C-J₈-J₆-J₇-J₈-W-J₁₀-J₁₁-C-J₁₃-J₁₄ and J₁ is selected from V, I, L, P, E, F, and M; J₂ is selected from D and N; J₃ is selected from F and W; J₈ is selected from A, E, S, R, K, Y, L, Q, G, M, F, T, W, and D; J₆ is selected from L, M, I, V, F, T, R, and S; J₇ is selected from Y, F, and N; J₈ is selected from N, R, D, H, K, Q, S, G, A, E, and M; J₁₀ is selected from P and R; J₁₁ is selected from V and I; J₁₃ is selected from D, G, N, R, S, Q, Y, T, A, E, L, V, K, M, I, H, F, and W; J₁₄ is selected from T, S, Q, L, D, N, A, E, K, M, V, R, I, H, P, V, and W; or the peptide comprises an amino acid sequence according to B₁-B₂-B₃-C-B₅-B₆-B₇-B₈-W-B₁₀-B₁₁-C-B₁₃-B₁₄ and B₁ is selected from V, I, L, P, E, F, and M; B₂ is selected from D and N; B₃ is selected from F and W; B₈ is selected from A, E, S, R, K, Y, L, Q, G, M, F, T, W, and D; B₆ is selected from L, M, I, V, F, T, R, and S; B₇ is selected from Y, F, and N; B₈ is selected from N, R, D, H, K, Q, S, G, A, E, and M; B₁₀ is selected from P and R; B₁₁ is selected from V and I; B₁₃ is selected from D, G, N, R, S, Q, Y, T, A, E, L, V, K, M, I, H, F, and W; and B₁₄ is selected from T, S, Q, L, D, N, A, E, K, M, V, R, I, H, P, V, G, and W. In some embodiments, X₁ is selected from N, D, S, Y, A, F, and T; X₂ is selected from S, T, D, A, H, V, Y, and N; X₃ is L; X₄ is selected from F, L, V, M, and W; X₆ is selected from V, F, and L; X₇ is selected from K, R, Q, and N; X₈ is selected from N and K; X₉ is selected from L, V, and I; X₁₀ is selected from Y, W, and F; X₁₂ is W; X₁₃ is selected from I, N, H, and T; and X₁₄ is selected from D, V, A, S, I, T, and N. In some embodiments, X₁ is selected from N, D, S, and Y; X₂ is selected from S, T, and D; X₃ is L; X₄ is selected from F, L, and V; X₆ is selected from V and F; X₇ is selected from K, R, and Q; X₈ is N; X₉ is selected from L and V; X₁₀ is selected from Y and W; X₁₂ is W; X₁₃ is selected from I, N, and H; and X₁₄ is selected from D, V, A, and S. In some embodiments, J₁ is selected from V, I, and L; J₂ is D; J₃ is F; J₈ is selected from A, E, S, R, K, Y, and L; J₆ is selected from L, M, and I; J₇ is Y; J₈ is selected from N, R, D, H, K, Q, S, and G; J₁₀ is P; J₁₁ is selected from V and I; J₁₃ is selected from D, G, N, R, S, Q, Y, T, and A; and J₁₄ is selected from T, S, Q, L, D, N, A, and E. In some embodiments, J₁ is selected from V, I, and L; J₂ is D; J₃ is F; J₈ is selected from A, E, S, and R; J₆ is selected from L, M, and I; J₇ is Y; J₈ is selected from N, R, and D; J₁₀ is P; J₁₁ is selected from V and I; J₁₃ is selected from D, G, N, R, S, and Q; J₁₄ is selected from T, S, Q, and L. In some embodiments, B₁ is selected from V, I, and L; B₂ is D; B₃ is F; B₈ is selected from A, E, S, R, K, Y, M, G, and L; B₆ is selected from L, M, and I; B₇ is Y; B₈ is selected from N, R, D, H, K, Q, S, and G; B₁₀ is P; B₁₁ is selected from V and I; B₁₃ is selected from D, G, N, R, S, Q, Y, T, H, and A; B₁₄ is selected from T, S, Q, L, D, N, A, G, and E. In some embodiments, B₁ is selected from V, I, and L; B₂ is D; B₃ is F; B₈ is selected from A, E, S, K, M, G, and R; B₆ is selected from L, M, and I; B₇ is Y; B₈ is selected from N, R, S, H, and D; B₁₀ is P; B₁₁ is selected from V and I; B₁₃ is selected from D, G, N, R, S, H, A, Y, and Q; and B₁₄ is selected from T, S, Q, G, and L.

[0256] In some embodiments, the peptide comprises the amino acid sequences according to SEQ ID NOs: 133-145.

[0257] In some embodiments, the peptide comprises the amino acid sequences according to SEQ ID NOs: 146-158.

[0258] In some embodiments, the peptide comprises an amino acid sequence according to any of the sequences of Table 27.

[0259] In some embodiments, the peptide comprises the amino acid sequences according to SEQ ID NOs: 159-178.

[0260] In some embodiments, the peptide comprises an amino acid sequences according to any of the sequences of Table 29.

[0261] In some embodiments, the peptide comprises the amino acid sequences according to SEQ ID NOs: 179-201.

[0262] In some embodiments, the peptide comprises the amino acid sequence according to SEQ ID NO: 24 or a peptide sequence that has 1, 2, or 3, amino acid substitutions, additions, or deletions relative to the amino acid sequence of SEQ ID NO: 24.

[0263] In some embodiments, the peptide comprises the amino acid sequence according to SEQ ID NO: 181 or a peptide sequence that has 1, 2, or 3, amino acid substitutions, additions, or deletions relative to the amino acid sequence of SEQ ID NO: 181.

[0264] In some embodiments, the peptide comprises the amino acid sequence according to SEQ ID NO: 186 or a peptide sequence that has 1, 2, or 3, amino acid substitutions, additions, or deletions relative to the amino acid sequence of SEQ ID NO: 186.

[0265] In some embodiments, the peptide comprises the amino acid sequence according to SEQ ID NO: 24.

[0266] In some embodiments, the peptide comprises the amino acid sequence according to SEQ ID NO: 181.

[0267] In some embodiments, the peptide comprises the amino acid sequence according to SEQ ID NO: 186.

[0268] In some embodiments, the anti-TROP2 binding domain comprises an antibody or an antibody fragment.

[0269] In some embodiments, the antibody or antibody fragment comprises a single chain variable fragment, a single domain antibody, Fab, or Fab′.

[0270] In some embodiments, the anti-TROP2 binding domain comprises heavy chain complementarity determining regions HC-CDR1, HC-CDR2, and HC-CDR3, wherein the HC-CDR1, the HC-CDR2, and the HC-CDR3 comprise: HC-CDR1: SEQ ID NO: 15, HC-CDR2: SEQ ID NO: 16, and HC-CDR3: SEQ ID NO: 17; and the anti-TROP2 binding domain comprises light chain complementarity determining regions CDRs: LC-CDR1, LC-CDR2, and LC-CDR3, wherein the LC-CDR1, the LC-CDR2, and the LC-CDR3 of the Fab comprise LC-CDR1: SEQ ID NO: 18, LC-CDR2: SEQ ID NO:19, and LC-CDR3: SEQ ID NO: 20.

[0271] In some embodiments, the antibody or antibody fragment comprises the Fab. In some embodiments, the anti-TROP2 binding domain comprises amino acid sequences according to SEQ ID NOs: 21-22. In some embodiments, the isolated polypeptide or polypeptide complex further comprises a half-life extending molecule (H₁). In some embodiments, the half-life extending molecule is linked to the peptide. In some embodiments, H₁ comprises a polymer. In some embodiments, the polymer is polyethylene glycol (PEG). In some embodiments, H₁ comprises albumin. In some embodiments, H₁ comprises an Fc domain. In some embodiments, the albumin is serum albumin. In some embodiments, the albumin is human serum albumin. In some embodiments, H₁ comprises a polypeptide, a ligand, or a small molecule. In some embodiments, the polypeptide, the ligand or the small molecule binds serum protein or a fragment thereof, a circulating immunoglobulin or a fragment thereof, or CD35/CR1. In some embodiments, the serum protein comprises a thyroxine-binding protein, a transthyretin, a 1-acid glycoprotein, a transferrin, transferrin receptor or a transferrin-binding portion thereof, a fibrinogen, or an albumin. In some embodiments, the circulating immunoglobulin molecule comprises IgG1, IgG2, IgG3, IgG4, slgA, IgM or IgD. In some embodiments, the serum protein is albumin. In some embodiments, the polypeptide is an antibody. In some embodiments, the antibody comprises a single domain antibody, a single chain variable fragment, or a Fab. In some embodiments, the single domain antibody comprises a single domain antibody that binds to albumin. In some embodiments, the single domain antibody is a human or humanized antibody. In some embodiments, the single domain antibody is 645gH1gL1. In some embodiments, the single domain antibody is 645dsgH5gL4. In some embodiments, the single domain antibody is 23-13-A01-sc02. In some embodiments, the single domain antibody is A10m3 or a fragment thereof. In some embodiments, the single domain antibody is DOM7r-31. In some embodiments, the single domain antibody is DOM7h-11-15. In some embodiments, the single domain antibody is Alb-1, Alb-8, or Alb-23. In some embodiments, the single domain antibody is 10E. In some embodiments, the single domain antibody comprises complementarity determining regions (CDRs): HC-CDR1, HC-CDR2, and HC-CDR3, wherein the HC-CDR1, the HC-CDR2, and the HC-CDR3 of the single domain antibody comprise: HC-CDR1: SEQ ID NO: 66, HC-CDR2: SEQ ID NO: 67, and HC-CDR3: SEQ ID NO: 68. In some embodiments, the single domain antibody comprises an amino acid sequence according to SEQ ID NO: 69. In some embodiments, the single domain antibody comprises complementarity determining regions (CDRs): HC-CDR1, HC-CDR2, and HC-CDR3, wherein the HC-CDR1, the HC-CDR2, and the HC-CDR3 of the single domain antibody comprise: HC-CDR1: SEQ ID NO: 70, HC-CDR2: SEQ ID NO: 71, and HC-CDR3: SEQ ID NO: 72. In some embodiments, the single domain antibody comprises an amino acid sequence according to SEQ ID NO: 73. In some embodiments, the single domain antibody is SA21. In some embodiments, the isolated polypeptide or polypeptide complex comprises a modified amino acid, a non-natural amino acid, a modified non-natural amino acid, or a combination thereof. In some embodiments, the modified amino acid or modified non-natural amino acid comprises a post-translational modification. In some embodiments, H₁ comprises a linking moiety (L₃) that connects H₁ to the peptide. In some embodiments, L₃ is a peptide sequence having at least 5 to no more than 50 amino acids. In some embodiments, L₃ is a peptide sequence having at least 10 to no more than 30 amino acids. In some embodiments, L₃ is a peptide sequence having at least 10 amino acids. In some embodiments, L₃ is a peptide sequence having at least 18 amino acids. In some embodiments, L₃ is a peptide sequence having at least 26 amino acids. In some embodiments, L₃ has a formula selected from the group consisting of (G₂S)ₙ, (GS)ₙ, (GSGGS)ₙ (SEQ ID NO: 62), (GGGS)ₙ (SEQ ID NO: 63), (GGGGS)ₙ (SEQ ID NO: 64), and (GSSGGS)ₙ (SEQ ID NO: 65), wherein n is an integer of at least 1. In some embodiments, L₃ comprises an amino acid sequence according to SEQ ID NO: 30.

### Methods of Treatment

[0272] In some embodiments, are methods of treating cancer in a subject need in need thereof comprising administering to the subject an isolated polypeptide or polypeptide complex as described herein. In some embodiments, the cancer has cells that express TROP2. In some instances, the cancer is a solid tumor cancer. In some embodiments, the cancer is lung, breast (e.g. HER2+; ER/PR+; TNBC), cervical, ovarian, colorectal, pancreatic or gastric.

[0273] In some embodiments, are methods of treating triple-negative breast cancer (TNBC), urothelial cancer (UC), non-small cell lung cancer (NSCLC), small cell lung cancer (SCLC), gastric cancer, esophageal cancer, head and neck cancer, prostate cancer, or endometrial cancer in a subject need in need thereof comprising administering to the subject an isolated polypeptide or polypeptide complex as described herein. In some embodiments, are methods of treating breast cancer, lung cancer, urothelial cancer, endometrial cancer, ovarian cancer, prostate cancer, pancreatic cancer, gastric cancer, colon cancer, head and neck cancer, and glioma in a subject need in need thereof comprising administering to the subject an isolated polypeptide or polypeptide complex as described herein.

[0274] Described herein, in some embodiments, are polypeptides or polypeptide complexes, wherein the polypeptides or polypeptide complexes comprise a long half-life. In some instances, the half-life of the polypeptides or polypeptide complexes is at least or about 12 hours, 24 hours 36 hours, 48 hours, 60 hours, 72 hours, 84 hours, 96 hours, 100 hours, 108 hours, 119 hours, 120 hours, 140 hours, 160 hours, 180 hours, 200 hours, or more than 200 hours. In some instances, the half-life of the polypeptides or polypeptide complexes is in a range of about 12 hours to about 300 hours, about 20 hours to about 280 hours, about 40 hours to about 240 hours, about 60 hours to about 200 hours, or about 80 hours to about 140 hours.

[0275] Described herein, in some embodiments, are isolated polypeptide or polypeptide complexes administered as once weekly. In some embodiments, the isolated polypeptide or polypeptide complexes are administered once weekly by intravenous, intramuscular, intralesional, topical, subcutaneous, infusion, or oral. In some embodiments, the isolated polypeptide or polypeptide complexes are administered once weekly by bolus injection. In some embodiments, the isolated polypeptide or polypeptide complexes are administered once weekly by continuous infusion. In some embodiments, the isolated polypeptide or polypeptide complex is administered to the subject once a week as a continuous infusion over a period of no more than 60 minutes. In some embodiments, the isolated polypeptide or polypeptide complex is administered to the subject once a week as a continuous intravenous infusion over a period of no more than 30 minutes. In some embodiments, the isolated polypeptide or polypeptide complex is administered to the subject once a week as a continuous intravenous infusion over a period of at least 10 minutes.

[0276] In some embodiments, the isolated polypeptide or polypeptide complex is administered to the subject once a week and the isolated polypeptide or polypeptide complex has a half-life of at least 30 hours. In some embodiments, the isolated polypeptide or polypeptide complex is administered to the subject once a week and the isolated polypeptide or polypeptide complex has a half-life of at least 50 hours. In some embodiments, the isolated polypeptide or polypeptide complex is administered to the subject once a week and the isolated polypeptide or polypeptide complex has a half-life of at least 60 hours. In some embodiments, the isolated polypeptide or polypeptide complex is administered to the subject once a week and the isolated polypeptide or polypeptide complex has a half-life of at least 70 hours. In some embodiments, the isolated polypeptide or polypeptide complex is administered to the subject once a week and the isolated polypeptide or polypeptide complex has a half-life of at least 80 hours. In some embodiments, the isolated polypeptide or polypeptide complex is administered to the subject once a week and the isolated polypeptide or polypeptide complex has a half-life of at least 90 hours. In some embodiments, the isolated polypeptide or polypeptide complex is administered to the subject once a week and the isolated polypeptide or polypeptide complex has a half-life of at least 100 hours. In some embodiments, the isolated polypeptide or polypeptide complex is administered to the subject once a week and the isolated polypeptide or polypeptide complex has a half-life of at least 110 hours. In some embodiments, the isolated polypeptide or polypeptide complex is administered to the subject once a week and the isolated polypeptide or polypeptide complex has a half-life of at least 115 hours.

Production of Antibodies that Bind to TROP2 and CD3

[0277] In some embodiments, polypeptides described herein (e.g., antibodies and its binding fragments) are produced using any method known in the art to be useful for the synthesis of polypeptides (e.g., antibodies), in particular, by chemical synthesis or by recombinant expression, and are preferably produced by recombinant expression techniques.

[0278] In some instances, an antibody or its binding fragment thereof is expressed recombinantly, and the nucleic acid encoding the antibody or its binding fragment is assembled from chemically synthesized oligonucleotides (e.g., as described in Kutmeier et al., 1994, BioTechniques 17:242), which involves the synthesis of overlapping oligonucleotides containing portions of the sequence encoding the antibody, annealing and ligation of those oligonucleotides, and then amplification of the ligated oligonucleotides by PCR.

[0279] Alternatively, a nucleic acid molecule encoding an antibody is optionally generated from a suitable source (e.g., an antibody cDNA library, or cDNA library generated from any tissue or cells expressing the immunoglobulin) by PCR amplification using synthetic primers hybridizable to the 3′ and 5′ ends of the sequence or by cloning using an oligonucleotide probe specific for the particular gene sequence.

[0280] In some instances, an antibody or its binding fragment thereof is optionally generated by immunizing an animal, such as a mouse, to generate polyclonal antibodies or, more preferably, by generating monoclonal antibodies, e.g., as described by Kohler and Milstein (1975, Nature 256:495-497) or, as described by Kozbor et al. (1983, Immunology Today 4:72) or Cole et al. (1985 in Monoclonal Antibodies and Cancer Therapy, Alan R. Liss, Inc., pp. 77-96). Alternatively, a clone encoding at least the Fab portion of the antibody is optionally obtained by screening Fab expression libraries (e.g., as described in Huse et al., 1989, Science 246:1275-1281) for clones of Fab fragments that bind the specific antigen or by screening antibody libraries (See, e.g., Clackson et al., 1991, Nature 352:624; Hane et al., 1997 Proc. Natl. Acad. Sci. USA 94:4937).

[0281] In some embodiments, techniques developed for the production of “chimeric antibodies” (Morrison et al., 1984, Proc. Natl. Acad. Sci. 81:851-855; Neuberger et al., 1984, Nature 312:604-608; Takeda et al., 1985, Nature 314:452-454) by splicing genes from a mouse antibody molecule of appropriate antigen specificity together with genes from a human antibody molecule of appropriate biological activity are used. A chimeric antibody is a molecule in which different portions are derived from different animal species, such as those having a variable region derived from a murine monoclonal antibody and a human immunoglobulin constant region.

[0282] In some embodiments, techniques described for the production of single chain antibodies (U.S. Pat. No. 4,694,778; Bird, 1988, Science 242:423-42; Huston et al., 1988, Proc. Natl. Acad. Sci. USA 85:5879-5883; and Ward et al., 1989, Nature 334:544-54) are adapted to produce single chain antibodies. Single chain antibodies are formed by linking the heavy and light chain fragments of the Fv region via an amino acid bridge, resulting in a single chain polypeptide. Techniques for the assembly of functional Fv fragments in E. coli are also optionally used (Skerra et al., 1988, Science 242:1038-1041).

[0283] In some embodiments, an expression vector comprising the nucleotide sequence of an antibody or the nucleotide sequence of an antibody is transferred to a host cell by conventional techniques (e.g., electroporation, liposomal transfection, and calcium phosphate precipitation), and the transfected cells are then cultured by conventional techniques to produce the antibody. In specific embodiments, the expression of the antibody is regulated by a constitutive, an inducible or a tissue, specific promoter.

[0284] In some embodiments, a variety of host-expression vector systems is utilized to express an antibody, or its binding fragment described herein. Such host-expression systems represent vehicles by which the coding sequences of the antibody is produced and subsequently purified, but also represent cells that are, when transformed or transfected with the appropriate nucleotide coding sequences, express an antibody or its binding fragment in situ. These include, but are not limited to, microorganisms such as bacteria (e.g., E. coli and B. subtilis) transformed with recombinant bacteriophage DNA, plasmid DNA or cosmid DNA expression vectors containing an antibody or its binding fragment coding sequences; yeast (e.g., Saccharomyces Pichia) transformed with recombinant yeast expression vectors containing an antibody or its binding fragment coding sequences; insect cell systems infected with recombinant virus expression vectors (e.g., baculovirus) containing an antibody or its binding fragment coding sequences; plant cell systems infected with recombinant virus expression vectors (e.g., cauliflower mosaic virus (CaMV) and tobacco mosaic virus (TMV)) or transformed with recombinant plasmid expression vectors (e.g., Ti plasmid) containing an antibody or its binding fragment coding sequences; or mammalian cell systems (e.g., COS, CHO, BH, 293, 293T, 3T3 cells) harboring recombinant expression constructs containing promoters derived from the genome of mammalian cells (e.g., metallothionein promoter) or from mammalian viruses (e.g. the adenovirus late promoter; the vaccinia virus 7.5K promoter).

[0285] For long-term, high-yield production of recombinant proteins, stable expression is preferred. In some instances, cell lines that stably express an antibody are optionally engineered. Rather than using expression vectors that contain viral origins of replication, host cells are transformed with DNA controlled by appropriate expression control elements (e.g., promoter, enhancer, sequences, transcription terminators, polyadenylation sites, etc.), and a selectable marker. Following the introduction of the foreign DNA, engineered cells are then allowed to grow for 1-2 days in an enriched media, and then are switched to a selective media. The selectable marker in the recombinant plasmid confers resistance to the selection and allows cells to stably integrate the plasmid into their chromosomes and grow to form foci that in turn are cloned and expanded into cell lines. This method can advantageously be used to engineer cell lines which express the antibody or its binding fragments.

[0286] In some instances, a number of selection systems are used, including but not limited to the herpes simplex virus thymidine kinase (Wigler et al., 1977, Cell 11:223), hypoxanthine-guanine phosphoribosyltransferase (Szybalska & Szybalski, 192, Proc. Natl. Acad. Sci. USA 48:202), and adenine phosphoribosyltransferase (Lowy et al., 1980, Cell 22:817) genes are employed in tk−, hgprt− or aprt− cells, respectively. Also, antimetabolite resistance are used as the basis of selection for the following genes: dhfr, which confers resistance to methotrexate (Wigler et al., 1980, Proc. Natl. Acad. Sci. USA 77:357; O'Hare et al., 1981, Proc. Natl. Acad. Sci. USA 78:1527); gpt, which confers resistance to mycophenolic acid (Mulligan & Berg, 1981, Proc. Natl. Acad. Sci. USA 78:2072); neo, which confers resistance to the aminoglycoside G-418 (Clinical Pharmacy 12:488-505; Wu and Wu, 1991, Biotherapy 3:87-95; Tolstoshev, 1993, Ann. Rev. Pharmacol. Toxicol. 32:573-596; Mulligan, 1993, Science 260:926-932; and Morgan and Anderson, 1993, Ann. Rev. Biochem. 62:191-217; May 1993, TIB TECH 11(5):155-215) and hygro, which confers resistance to hygromycin (Santerre et al., 1984, Gene 30:147). Methods commonly known in the art of recombinant DNA technology which can be used are described in Ausubel et al. (eds., 1993, Current Protocols in Molecular Biology, John Wiley & Sons, NY; Kriegler, 1990, Gene Transfer and Expression, A Laboratory Manual, Stockton Press, NY; and in Chapters 12 and 13, Dracopoli et al. (eds), 1994, Current Protocols in Human Genetics, John Wiley & Sons, NY.; Colberre-Garapin et al., 1981, J. Mol. Biol. 150:1).

[0287] In some instances, the expression levels of an antibody are increased by vector amplification (for a review, see Bebbington and Hentschel, the use of vectors based on gene amplification for the expression of cloned genes in mammalian cells in DNA cloning, Vol. 3. (Academic Press, New York, 1987)). When a marker in the vector system expressing an antibody is amplifiable, an increase in the level of inhibitor present in culture of host cell will increase the number of copies of the marker gene. Since the amplified region is associated with the nucleotide sequence of the antibody, production of the antibody will also increase (Crouse et al., 1983, Mol. Cell Biol. 3:257).

[0288] In some instances, any method known in the art for purification of an antibody is used, for example, by chromatography (e.g., ion exchange, affinity, particularly by affinity for the specific antigen after Protein A, and sizing column chromatography), centrifugation, differential solubility, or by any other standard technique for the purification of proteins.

### Expression Vectors

[0289] In some embodiments, vectors include any suitable vectors derived from either a eukaryotic or prokaryotic sources. In some cases, vectors are obtained from bacteria (e.g. E. coli), insects, yeast (e.g. Pichia pastoris), algae, or mammalian sources. Exemplary bacterial vectors include pACYC177, pASK75, pBAD vector series, pBADM vector series, pET vector series, pETM vector series, pGEX vector series, pHAT, pHAT2, pMal-c2, pMal-p2, pQE vector series, pRSET A, pRSET B, pRSET C, pTrcHis2 series, pZA31-Luc, pZE21-MCS-1, pFLAG ATS, pFLAG CTS, pFLAG MAC, pFLAG Shift-12c, pTAC-MAT-1, pFLAG CTC, or pTAC-MAT-2.

[0290] Exemplary insect vectors include pFastBacl, pFastBac DUAL, pFastBac ET, pFastBac HTa, pFastBac HTb, pFastBac HTc, pFastBac M30a, pFastBact M30b, pFastBac, M30c, pVL1392, pVL1393, pVL1393 M10, pVL1393 M11, pVL1393 M12, FLAG vectors such as pPolh-FLAG1 or pPolh-MAT 2, or MAT vectors such as pPolh-MAT1, or pPolh-MAT2.

[0291] In some cases, yeast vectors include Gateway® pDEST™ 14 vector, Gateway@ pDEST™ 15 vector, Gateway@ pDEST™ 17 vector, Gateway® pDEST™ 24 vector, Gateway® pYES-DEST52 vector, pBAD-DEST49 Gateway® destination vector, pAO815 Pichia vector, pFLD1 Pichi pastoris vector, pGAPZA, B, & C Pichia pastoris vector, pPIC3.5K Pichia vector, pPIC6 A, B, & C Pichia vector, pPIC9K Pichia vector, pTEF1/Zeo, pYES2 yeast vector, pYES2/CT yeast vector, pYES2/NT A, B, & C yeast vector, or pYES3/CT yeast vector.

[0292] Exemplary algae vectors include pChlamy-4 vector or MCS vector.

[0293] Examples of mammalian vectors include transient expression vectors or stable expression vectors. Mammalian transient expression vectors may include pRK5, p3×FLAG-CMV 8, pFLAG-Myc-CMV 19, pFLAG-Myc-CMV 23, pFLAG-CMV 2, pFLAG-CMV 6a,b,c, pFLAG-CMV 5.1, pFLAG-CMV 5a,b,c, p3×FLAG-CMV 7.1, pFLAG-CMV 20, p3×FLAG-Myc-CMV 24, pCMV-FLAG-MAT1, pCMV-FLAG-MAT2, pBICEP-CMV 3, or pBICEP-CMV 4. Mammalian stable expression vector may include pFLAG-CMV 3, p3×FLAG-CMV 9, p3×FLAG-CMV 13, pFLAG-Myc-CMV 21, p3×FLAG-Myc-CMV 25, pFLAG-CMV 4, p3×FLAG-CMV 10, p3×FLAG-CMV 14, pFLAG-Myc-CMV 22, p3×FLAG-Myc-CMV 26, pBICEP-CMV 1, or pBICEP-CMV 2.

[0294] In some instances, a cell-free system is a mixture of cytoplasmic and/or nuclear components from a cell and is used for in vitro nucleic acid synthesis. In some cases, a cell-free system utilizes either prokaryotic cell components or eukaryotic cell components. Sometimes, a nucleic acid synthesis is obtained in a cell-free system based on for example Drosophila cell, Xenopus egg, or HeLa cells. Exemplary cell-free systems include, but are not limited to, E. coli S30 Extract system, E. coli T7 S30 system, or PURExpress®.

### Host Cells

[0295] In some embodiments, a host cell includes any suitable cell such as a naturally derived cell or a genetically modified cell. In some instances, a host cell is a production host cell. In some instances, a host cell is a eukaryotic cell. In other instances, a host cell is a prokaryotic cell. In some cases, a eukaryotic cell includes fungi (e.g., yeast cells), animal cell or plant cell. In some cases, a prokaryotic cell is a bacterial cell. Examples of bacterial cell include gram-positive bacteria or gram-negative bacteria. Sometimes the gram-negative bacteria is anaerobic, rod-shaped, or both.

[0296] In some instances, gram-positive bacteria include Actinobacteria, Firmicutes or Tenericutes. In some cases, gram-negative bacteria include Aquificae, Deinococcus-Thermus, Fibrobacteres-Chlorobi/Bacteroidetes (FCB group), Fusobacteria, Gemmatimonadetes, Nitrospirae, Planctomycetes-Verrucomicrobia/Chlamydiae (PVC group), Proteobacteria, Spirochaetes or Synergistetes. Other bacteria can be Acidobacteria, Chloroflexi, Chrysiogenetes, Cyanobacteria, Deferribacteres, Dictyoglomi, Thermodesulfobacteria or Thermotogae. A bacterial cell can be Escherichia coli, Clostridium botulinum, or Coli bacilli.

[0297] Exemplary prokaryotic host cells include, but are not limited to, BL21, Mach1™, DH10B™ TOP10, DH5α, DH10Bac™, OmniMax™, MegaX™, DH12S™, INV110, TOP10F′, INVαF, TOP10/P₃, ccdB Survival, PIR1, PIR2, Stbl2™, Stbl3™, or Stbl4™.

[0298] In some instances, animal cells include a cell from a vertebrate or from an invertebrate. In some cases, an animal cell includes a cell from a marine invertebrate, fish, insects, amphibian, reptile, or mammal. In some cases, a fungus cell includes a yeast cell, such as brewer's yeast, baker's yeast, or wine yeast.

[0299] Fungi include ascomycetes such as yeast, mold, filamentous fungi, basidiomycetes, or zygomycetes. In some instances, yeast includes Ascomycota or Basidiomycota. In some cases, Ascomycota includes Saccharomycotina (true yeasts, e.g. Saccharomyces cerevisiae (baker's yeast)) or Taphrinomycotina (e.g. Schizosaccharomycetes (fission yeasts)). In some cases, Basidiomycota includes Agaricomycotina (e.g. Tremellomycetes) or Pucciniomycotina (e.g. Microbotryomycetes).

[0300] Exemplary yeast or filamentous fungi include, for example, the genus: Saccharomyces, Schizosaccharomyces, Candida, Pichia, Hansenula, Kluyveromyces, Zygosaccharomyces, Yarrowia, Trichosporon, Rhodosporidi, Aspergillus, Fusarium, or Trichoderma. Exemplary yeast or filamentous fungi include, for example, the species: Saccharomyces cerevisiae, Schizosaccharomyces pombe, Candida utilis, Candida boidini, Candida albicans, Candida tropicalis, Candida stellatoidea, Candida glabrata, Candida krusei, Candida parapsilosis, Candida guilliermondii, Candida viswanathii, Candida lusitaniae, Rhodotorula mucilaginosa, Pichia metanolica, Pichia angusta, Pichia pastoris, Pichia anomala, Hansenula polymorpha, Kluyveromyces lactis, Zygosaccharomyces rouxii, Yarrowia lipolytica, Trichosporon pullulans, Rhodosporidium toru-Aspergillus niger, Aspergillus nidulans, Aspergillus awamori, Aspergillus oryzae, Trichoderma reesei, Yarrowia lipolytica, Brettanomyces bruxellensis, Candida stellata, Schizosaccharomyces pombe, Torulaspora delbrueckii, Zygosaccharomyces baili, Cryptococcus neoformans, Cryptococcus gattii, or Saccharomyces boulardii.

[0301] Exemplary yeast host cells include, but are not limited to, Pichia pastoris yeast strains such as GS115, KM71H, SMD1168, SMD1168H, and X-33; and Saccharomyces cerevisiae yeast strain such as INVScl.

[0302] In some instances, additional animal cells include cells obtained from a mollusk, arthropod, annelid or sponge. In some cases, an additional animal cell is a mammalian cell, e.g., from a primate, ape, equine, bovine, porcine, canine, feline or rodent. In some cases, a rodent includes mouse, rat, hamster, gerbil, hamster, chinchilla, fancy rat, or guinea pig.

[0303] Exemplary mammalian host cells include, but are not limited to, 293A cell line, 293FT cell line, 293F cells, 293 H cells, CHO DG44 cells, CHO-S cells, CHO-K1 cells, FUT8 KO CHOK1, Expi293F™ cells, Flp-In™ T-REx™ 293 cell line, Flp-In™-293 cell line, Flp-In™-3T3 cell line, Flp-In™-BHK cell line, Flp-In™-CHO cell line, Flp-In™-CV-1 cell line, Flp-In™-Jurkat cell line, FreeStyle™ 293-F cells, FreeStyle™ CHO-S cells, GripTite™ 293 MSR cell line, GS-CHO cell line, HepaRG™ cells, T-REx™ Jurkat cell line, Per.C6 cells, T-REx™-293 cell line, T-REx™-CHO cell line, and T-REx™-HeLa cell line.

[0304] In some instances, a mammalian host cell is a stable cell line, or a cell line that has incorporated a genetic material of interest into its own genome and has the capability to express the product of the genetic material after many generations of cell division. In some cases, a mammalian host cell is a transient cell line, or a cell line that has not incorporated a genetic material of interest into its own genome and does not have the capability to express the product of the genetic material after many generations of cell division.

[0305] Exemplary insect host cells include, but are not limited to, Drosophila S2 cells, Sf9 cells, Sf21 cells, High Five™ cells, and expresSF+® cells.

[0306] In some instances, plant cells include a cell from algae. Exemplary insect cell lines include, but are not limited to, strains from Chlamydomonas reinhardtii 137c, or Synechococcus elongatus PPC7942.

### Articles of Manufacture

[0307] In another aspect of the invention, an article of manufacture containing materials useful for the treatment, prevention and/or diagnosis of the disorders described above is provided. The article of manufacture comprises a container and a label or package insert on or associated with the container. Suitable containers include, for example, bottles, vials, syringes, IV solution bags, etc. The containers may be formed from a variety of materials such as glass or plastic. The container holds a composition which is by itself or combined with another composition effective for treating, preventing and/or diagnosing the condition and may have a sterile access port (for example the container may be an intravenous solution bag or a vial having a stopper that is pierceable by a hypodermic injection needle). At least one active agent in the composition is a bispecific antibody comprising a first antigen-binding site that specifically binds to CD3 and a second antigen-binding site that specifically binds to TROP2 as defined herein before.

[0308] The label or package insert indicates that the composition is used for treating the condition of choice. Moreover, the article of manufacture may comprise (a) a first container with a composition contained therein, wherein the composition comprises the bispecific antibody of the invention; and (b) a second container with a composition contained therein, wherein the composition comprises a further cytotoxic or otherwise therapeutic agent. The article of manufacture in this embodiment of the invention may further comprise a package insert indicating that the compositions can be used to treat a particular condition.

[0309] Alternatively, or additionally, the article of manufacture may further comprise a second (or third) container comprising a pharmaceutically-acceptable buffer, such as bacteriostatic water for injection (BWFI), phosphate-buffered saline, Ringer's solution and dextrose solution. It may further include other materials desirable from a commercial and user standpoint, including other buffers, diluents, filters, needles, and syringes.

### Certain Definitions

[0310] The terminology used herein is for the purpose of describing particular cases only and is not intended to be limiting. As used herein, the singular forms “a”, “an” and “the” are intended to include the plural forms as well, unless the context clearly indicates otherwise. Furthermore, to the extent that the terms “including”, “includes”, “having”, “has”, “with”, or variants thereof are used in either the detailed description and/or the claims, such terms are intended to be inclusive in a manner similar to the term “comprising.”

[0311] The term “antibody” is used in the broadest sense and covers fully assembled antibodies, antibody fragments that can bind antigen, for example, Fab, F(ab′)2, Fv, single chain antibodies (scFv), diabodies, antibody chimeras, hybrid antibodies, bispecific antibodies, and the like.

[0312] The term “complementarity determining region” or “CDR” is a segment of the variable region of an antibody that is complementary in structure to the epitope to which the antibody binds and is more variable than the rest of the variable region. Accordingly, a CDR is sometimes referred to as hypervariable region. A variable region comprises three CDRs. CDR peptides can be obtained by constructing genes encoding the CDR of an antibody of interest. Such genes are prepared, for example, by using the polymerase chain reaction to synthesize the variable region from RNA of antibody-producing cells. See, for example, Larrick et al., Methods: A Companion to Methods in Enzymology 2: 106 (1991); Courtenay-Luck, “Genetic Manipulation of Monoclonal Antibodies,” in Monoclonal Antibodies: Production, Engineering and Clinical Application, Ritter et al. (eds.), pages 166-179 (Cambridge University Press 1995); and Ward et al., “Genetic Manipulation and Expression of Antibodies,” in Monoclonal Antibodies: Principles and Applications, Birch et al., (eds.), pages 137-185 (Wiley-Liss, Inc. 1995).

[0313] The term “Fab” refers to a protein that contains the constant domain of the light chain and the first constant domain (CH1) of the heavy chain. Fab fragments differ from Fab′ fragments by the addition of a few residues at the carboxy terminus of the heavy chain CH1 domain including one or more cysteines from the antibody hinge region. Fab′-SH is the designation herein for Fab′ in which the cysteine residue(s) of the constant domains bear a free thiol group. Fab′ fragments are produced by reducing the F(ab′)2 fragment's heavy chain disulfide bridge. Other chemical couplings of antibody fragments are also known.

[0314] A “single-chain variable fragment (scFv)” is a fusion protein of the variable regions of the heavy (VH) and light chains (VL) of an antibody, connected with a short linker peptide of ten to about 25 amino acids. The linker is usually rich in glycine for flexibility, as well as serine or threonine for solubility, and can either connect the N-terminus of the VH with the C-terminus of the VL, or vice versa. This protein retains the specificity of the original antibody, despite removal of the constant regions and the introduction of the linker. scFv antibodies are, e.g. described in Houston, J. S., Methods in Enzymol. 203 (1991) 46-96). In addition, antibody fragments comprise single chain polypeptides having the characteristics of a VH domain, namely being able to assemble together with a VL domain, or of a VL domain, namely being able to assemble together with a VH domain to a functional antigen binding site and thereby providing the antigen binding property of full length antibodies.

[0315] While preferred embodiments of the present disclosure have been shown and described herein, it will be obvious to those skilled in the art that such embodiments are provided by way of example only. Numerous variations, changes, and substitutions will now occur to those skilled in the art without departing from the disclosure. It should be understood that various alternatives to the embodiments of the disclosure described herein may be employed in practicing the disclosure. It is intended that the following claims define the scope of the disclosure and that methods and structures within the scope of these claims and their equivalents be covered thereby.

### EMBODIMENTS

[0316] Embodiment 1 comprises an isolated polypeptide or polypeptide complex according to Formula I: A₂-A₁-L₁-P₁-H₁ wherein: A₁ comprises a first antigen recognizing molecule that binds to an effector cell antigen; P₁ comprises a peptide that binds to A₁; L₁ comprises a linking moiety that connects A₁ to P₁ and is a substrate for a tumor specific protease; H₁ comprises a half-life extending molecule; and A₂ comprises a second antigen recognizing molecule that binds to TROP2.

[0317] Embodiment 2 comprises an isolated polypeptide or polypeptide complex of embodiment 1, wherein the first antigen recognizing molecule comprises an antibody or antibody fragment.

[0318] Embodiment 3 comprises an isolated polypeptide or polypeptide complex of any one of embodiments 1-2, wherein the first antigen recognizing molecule comprises an antibody or antibody fragment that is human or humanized.

[0319] Embodiment 4 comprises an isolated polypeptide or polypeptide complex of any one of embodiments 1-3, wherein L₁ is bound to N-terminus of the first antigen recognizing molecule.

[0320] Embodiment 5 comprises an isolated polypeptide or polypeptide complex of any one of embodiments 1-4, wherein A₂ is bound to C-terminus of the first antigen recognizing molecule.

[0321] Embodiment 6 comprises an isolated polypeptide or polypeptide complex of any one of embodiments 1-3, wherein L₁ is bound to C-terminus of the first antigen recognizing molecule.

[0322] Embodiment 7 comprises an isolated polypeptide or polypeptide complex of any one of embodiments 1-3 and 6, wherein A₂ is bound to N-terminus of the first antigen recognizing molecule.

[0323] Embodiment 8 comprises an isolated polypeptide or polypeptide complex of embodiment 2, wherein the antibody or antibody fragment comprises a single chain variable fragment, a single domain antibody, or a Fab fragment.

[0324] Embodiment 9 comprises an isolated polypeptide or polypeptide complex of embodiment 8, wherein A₁ is the single chain variable fragment (scFv).

[0325] Embodiment 10 comprises an isolated polypeptide or polypeptide complex of embodiment 9, wherein the scFv comprises a scFv heavy chain polypeptide and a scFv light chain polypeptide.

[0326] Embodiment 11 comprises an isolated polypeptide or polypeptide complex of embodiment 8, wherein A₁ is the single domain antibody.

[0327] Embodiment 12 comprises an isolated polypeptide or polypeptide complex of embodiment 2, wherein the antibody or antibody fragment comprises a single chain variable fragment (scFv), a heavy chain variable domain (VH domain), a light chain variable domain (VL domain), or a variable domain (VHH) of a camelid derived single domain antibody.

[0328] Embodiment 13 comprises an isolated polypeptide or polypeptide complex of any one of embodiments 1-10 and 12, wherein A₁ comprises an anti-CD3e single chain variable fragment.

[0329] Embodiment 14 comprises an isolated polypeptide or polypeptide complex of any one of embodiments 1-10 and 12-13, wherein A₁ comprises an anti-CD3e single chain variable fragment that has a K_{D} binding of 1 μM or less to CD3 on CD3 expressing cells.

[0330] Embodiment 15 comprises an isolated polypeptide or polypeptide complex of any one of embodiments 1-14, wherein the effector cell antigen comprises CD3.

[0331] Embodiment 16 comprises an isolated polypeptide or polypeptide complex of any one of embodiments 1-15, wherein A₁ comprises a variable light chain and variable heavy chain each of which is capable of specifically binding to human CD3.

[0332] Embodiment 17 comprises an isolated polypeptide or polypeptide complex of any one of embodiments 1-16, wherein A₁ comprises complementary determining regions (CDRs) selected from the group consisting of muromonab-CD3 (OKT3), otelixizumab (TRX4), teplizumab (MGA031), visilizumab (Nuvion), SP34, X35, VIT3, BMA030 (BW264/56), CLB-T3/3, CRIS7, YTH12.5, F111-409, CLB-T3.4.2, TR-66, WT32, SPv-T3b, 11D8, XIII-141, XIII-46, XIII-87, 12F6, T3/RW2-8C8, T3/RW2-4B6, OKT3D, M-T301, SMC2, F101.01, UCHT-1, WT-31, 15865, 15865v12, 15865v16, and 15865v19.

[0333] Embodiment 18 comprises an isolated polypeptide or polypeptide complex of any one of embodiments 1-17, wherein the isolated polypeptide or polypeptide complex of Formula I binds to an effector cell when L₁ is cleaved by the tumor specific protease.

[0334] Embodiment 19 comprises an isolated polypeptide or polypeptide complex of any one of embodiments 1-17, wherein the isolated polypeptide or polypeptide complex of Formula I binds to an effector cell when L₁ is cleaved by the tumor specific protease and A₁ binds to the effector cell.

[0335] Embodiment 20 comprises an isolated polypeptide or polypeptide complex of any one of embodiments 18-19, wherein the effector cell is a T cell.

[0336] Embodiment 21 comprises an isolated polypeptide or polypeptide complex of any one of embodiments 18-20, wherein A₁ binds to a polypeptide that is part of a TCR-CD3 complex on the effector cell.

[0337] Embodiment 22 comprises an isolated polypeptide or polypeptide complex of embodiment 21, wherein the polypeptide that is part of the TCR-CD3 complex is human CD3ε.

[0338] Embodiment 23 comprises an isolated polypeptide or polypeptide complex of any one of embodiments 9-10 and 12-22, wherein the effector cell antigen comprises CD3, wherein the scFv comprises complementarity determining regions (CDRs): HC-CDR1, HC-CDR2, and HC-CDR3, wherein the HC-CDR1, the HC-CDR2, and the HC-CDR3 of the scFv comprise: HC-CDR1: SEQ ID NO: 1, HC-CDR2: SEQ ID NO: 2, and HC-CDR3: SEQ ID NO: 3; and the scFv comprises CDRs: LC-CDR1, LC-CDR2, and LC-CDR3, wherein the LC-CDR1, the LC-CDR2, and the LC-CDR3 of the scFv comprise LC-CDR1: SEQ ID NO: 4, LC-CDR2: SEQ ID NO:5, and LC-CDR3: SEQ ID NO: 6.

[0339] Embodiment 24 comprises an isolated polypeptide or polypeptide complex of any one of embodiments 1-23, wherein the effector cell antigen comprises CD3, wherein A₁ comprises complementarity determining regions (CDRs): HC-CDR1, HC-CDR2, and HC-CDR3, wherein the HC-CDR1, the HC-CDR2, and the HC-CDR3 of A₁ comprise: HC-CDR1: SEQ ID NO: 1, HC-CDR2: SEQ ID NO: 2, and HC-CDR3: SEQ ID NO: 3; and A₁ comprises CDRs: LC-CDR1, LC-CDR2, and LC-CDR3, wherein the LC-CDR1, the LC-CDR2, and the LC-CDR3 of A₁ comprise LC-CDR1: SEQ ID NO: 4, LC-CDR2: SEQ ID NO:5, and LC-CDR3: SEQ ID NO: 6.

[0340] Embodiment 25 comprises an isolated polypeptide or polypeptide complex of any one of embodiments 9-10 and 12-22, wherein the effector cell antigen comprises CD3, and the scFv comprises an amino acid sequence according to SEQ ID NO: 13.

[0341] Embodiment 26 comprises an isolated polypeptide or polypeptide complex of any one of embodiments 9-10 and 12-22, wherein the effector cell antigen comprises CD3, wherein the scFv comprises complementarity determining regions (CDRs): HC-CDR1, HC-CDR2, and HC-CDR3, wherein the HC-CDR1, the HC-CDR2, and the HC-CDR3 of the scFv comprise: HC-CDR1: SEQ ID NO: 7, HC-CDR2: SEQ ID NO: 8, and HC-CDR3: SEQ ID NO: 9; and the scFv comprises CDRs: LC-CDR1, LC-CDR2, and LC-CDR3, wherein the LC-CDR1, the LC-CDR2, and the LC-CDR3 of the scFv comprise LC-CDR1: SEQ ID NO: 10, LC-CDR2: SEQ ID NO: 11, and LC-CDR3: SEQ ID NO: 12.

[0342] Embodiment 27 comprises an isolated polypeptide or polypeptide complex of any one of embodiments 1-22, wherein the effector cell antigen comprises CD3, wherein A₁ comprises complementarity determining regions (CDRs): HC-CDR1, HC-CDR2, and HC-CDR3, wherein the HC-CDR1, the HC-CDR2, and the HC-CDR3 of A₁ comprise: HC-CDR1: SEQ ID NO: 7, HC-CDR2: SEQ ID NO: 8, and HC-CDR3: SEQ ID NO: 9; and A₁ comprises CDRs: LC-CDR1, LC-CDR2, and LC-CDR3, wherein the LC-CDR1, the LC-CDR2, and the LC-CDR3 of A₁ comprise LC-CDR1: SEQ ID NO: 10, LC-CDR2: SEQ ID NO: 11, and LC-CDR3: SEQ ID NO: 12.

[0343] Embodiment 28 comprises an isolated polypeptide or polypeptide complex of any one of embodiments 9-10 and 12-22, wherein the effector cell antigen comprises CD3, and the scFv comprises an amino acid sequence according to SEQ ID NO: 14.

[0344] Embodiment 29 comprises an isolated polypeptide or polypeptide complex of any one of embodiments 1-28, wherein second antigen recognizing molecule comprises an antibody or antibody fragment.

[0345] Embodiment 30 comprises an isolated polypeptide or polypeptide complex of embodiment 29, wherein the antibody or antibody fragment thereof comprises a single chain variable fragment, a single domain antibody, or a Fab.

[0346] Embodiment 31 comprises an isolated polypeptide or polypeptide complex of embodiment 30, wherein the antibody or antibody fragment thereof comprises a single chain variable fragment (scFv), a heavy chain variable domain (VH domain), a light chain variable domain (VL domain), a variable domain (VHH) of a camelid derived single domain antibody.

[0347] Embodiment 32 comprises an isolated polypeptide or polypeptide complex of any one of embodiments 29-31, wherein the antibody or antibody fragment thereof is humanized or human.

[0348] Embodiment 33 comprises an isolated polypeptide or polypeptide complex of embodiment 30, wherein A₂ is the Fab.

[0349] Embodiment 34 comprises an isolated polypeptide or polypeptide complex of embodiment 33, wherein the Fab comprises (a) a Fab light chain polypeptide and (b) a Fab heavy chain polypeptide.

[0350] Embodiment 35 comprises an isolated polypeptide or polypeptide complex of any one of embodiments 33-34, wherein the Fab comprises complementarity determining regions (CDRs): HC-CDR1, HC-CDR2, and HC-CDR3, wherein the HC-CDR1, the HC-CDR2, and the HC-CDR3 of the Fab comprise: HC-CDR1: SEQ ID NO: 15, HC-CDR2: SEQ ID NO: 16, and HC-CDR3: SEQ ID NO: 17; and the Fab comprises CDRs: LC-CDR1, LC-CDR2, and LC-CDR3, wherein the LC-CDR1, the LC-CDR2, and the LC-CDR3 of the Fab comprise LC-CDR1: SEQ ID NO: 18, LC-CDR2: SEQ ID NO: 19, and LC-CDR3: SEQ ID NO: 20.

[0351] Embodiment 36 comprises an isolated polypeptide or polypeptide complex of any one of embodiments 1-35, wherein A₂ comprises complementarity determining regions (CDRs): HC-CDR1, HC-CDR2, and HC-CDR3, wherein the HC-CDR1, the HC-CDR2, and the HC-CDR3 of A₂ comprise: HC-CDR1: SEQ ID NO: 15, HC-CDR2: SEQ ID NO: 16, and HC-CDR3: SEQ ID NO: 17; and A₂ comprises CDRs: LC-CDR1, LC-CDR2, and LC-CDR3, wherein the LC-CDR1, the LC-CDR2, and the LC-CDR3 of A₂ comprise LC-CDR1: SEQ ID NO: 18, LC-CDR2: SEQ ID NO: 19, and LC-CDR3: SEQ ID NO: 20.

[0352] Embodiment 37 comprises an isolated polypeptide or polypeptide complex of embodiment 34, wherein the Fab light chain polypeptide comprises an amino acid sequence according to SEQ ID NO: 21.

[0353] Embodiment 38 comprises an isolated polypeptide or polypeptide complex of embodiment 34 and 37, wherein Fab heavy chain polypeptide comprises an amino acid sequence according to SEQ ID NO: 22.

[0354] Embodiment 39 comprises an isolated polypeptide or polypeptide complex of any one of embodiments 34 and 37-38, wherein the Fab light chain polypeptide of A₂ is bound to a C-terminus of the single chain variable fragment (scFv) of A₁.

[0355] Embodiment 40 comprises an isolated polypeptide or polypeptide complex of any one of embodiments 34 and 37-38, wherein the Fab heavy chain polypeptide of A₂ is bound to a C-terminus of the single chain variable fragment (scFv) A₁.

[0356] Embodiment 41 comprises an isolated polypeptide or polypeptide complex of any one of embodiments 34, 37-38 and 40, wherein the Fab light chain polypeptide of A₂ is bound to a N-terminus of the single chain variable fragment (scFv) of A₁.

[0357] Embodiment 42 comprises an isolated polypeptide or polypeptide complex of any one of embodiments 34 and 37-39, wherein the Fab heavy chain polypeptide of A₂ is bound to a N-terminus of the single chain variable fragment (scFv) A₁.

[0358] Embodiment 43 comprises an isolated polypeptide or polypeptide complex of any one of embodiments 34-38, wherein the Fab heavy chain polypeptide of A₂ is bound to the scFv heavy chain polypeptide of A₁.

[0359] Embodiment 44 comprises an isolated polypeptide or polypeptide complex of any one of embodiments 34-38, wherein the Fab light chain polypeptide of A₂ is bound to the scFv heavy chain polypeptide of A₁.

[0360] Embodiment 45 comprises an isolated polypeptide or polypeptide complex of any one of embodiments 34-48, wherein the Fab heavy chain polypeptide of A₂ is bound to the scFv light chain polypeptide of A₁.

[0361] Embodiment 46 comprises an isolated polypeptide or polypeptide complex of any one of embodiments 34-38, wherein the Fab light chain polypeptide of A₂ is bound to the scFv light chain polypeptide of A₁.

[0362] Embodiment 47 comprises an isolated polypeptide or polypeptide complex of any one of embodiments 1-46, wherein A₂ further comprises P₂ and L₂, wherein P₂ comprises a peptide that binds to A₂; and L₂ comprises a linking moiety that connects A₂ to P₂ and is a substrate for a tumor specific protease.

[0363] Embodiment 48 comprises an isolated polypeptide or polypeptide complex of embodiment 47, wherein the isolated polypeptide or polypeptide complex is according to Formula Ia: P₂-L₂-A₂-A₁-L₁-P₁-H₁.

[0364] Embodiment 49 comprises an isolated polypeptide or polypeptide complex of any one of embodiments 47-48, wherein the Fab heavy chain polypeptide of A₂ is bound to the scFv heavy chain polypeptide of A₁ and L₂ is bound to the Fab light chain polypeptide of A₂.

[0365] Embodiment 50 comprises an isolated polypeptide or polypeptide complex of any one of embodiments 47-48, wherein the Fab light chain polypeptide of A₂ is bound to the scFv heavy chain polypeptide of A₁ and L₂ is bound to the Fab heavy chain polypeptide of A₂.

[0366] Embodiment 51 comprises an isolated polypeptide or polypeptide complex of any one of embodiments 47-48, wherein the Fab heavy chain polypeptide of A₂ is bound to the scFv light chain polypeptide of A₁ and L₂ is bound to the Fab light chain polypeptide of A₂.

[0367] Embodiment 52 comprises an isolated polypeptide or polypeptide complex of any one of embodiments 47-48, wherein the Fab light chain polypeptide of A₂ is bound to the scFv light chain polypeptide of A₁ and L₂ is bound to the Fab heavy chain polypeptide of A₂.

[0368] Embodiment 53 comprises an isolated polypeptide or polypeptide complex of any one of embodiments 1-52, wherein P₁ impairs binding of A₁ to the effector cell antigen.

[0369] Embodiment 54 comprises an isolated polypeptide or polypeptide complex of any one of embodiments 1-53, wherein P₁ is bound to A₁ through ionic interactions, electrostatic interactions, hydrophobic interactions, Pi-stacking interactions, and H-bonding interactions, or a combination thereof.

[0370] Embodiment 55 comprises an isolated polypeptide or polypeptide complex of any one of embodiments 1-54, wherein P₁ has less than 70% sequence homology to the effector cell antigen.

[0371] Embodiment 56 comprises an isolated polypeptide or polypeptide complex of any one of embodiments 47-55, wherein P₂ impairs binding of A₂ to TROP2.

[0372] Embodiment 57 comprises an isolated polypeptide or polypeptide complex of any one of embodiments 47-56, wherein P₂ is bound to A₂ through ionic interactions, electrostatic interactions, hydrophobic interactions, Pi-stacking interactions, and H-bonding interactions, or a combination thereof.

[0373] Embodiment 58 comprises an isolated polypeptide or polypeptide complex of any one of embodiments 47-57, wherein P₂ is bound to A₂ at or near an antigen binding site.

[0374] Embodiment 59 comprises an isolated polypeptide or polypeptide complex of any one of embodiments 47-58, wherein P₂ has less than 70% sequence homology to TROP2.

[0375] Embodiment 60 comprises an isolated polypeptide or polypeptide complex of any one of embodiments 47-59, wherein P₁ or P₂ comprises a peptide sequence of at least 10 amino acids in length.

[0376] Embodiment 61 comprises an isolated polypeptide or polypeptide complex of any one of embodiments 47-60, wherein P₁ or P₂ comprises a peptide sequence of at least 10 amino acids in length and no more than 20 amino acids in length.

[0377] Embodiment 62 comprises an isolated polypeptide or polypeptide complex of any one of embodiments 47-59, wherein P₁ or P₂ comprises a peptide sequence of at least 16 amino acids in length.

[0378] Embodiment 63 comprises an isolated polypeptide or polypeptide complex of any one of embodiments 47-60 and 62, wherein P₁ or P₂ comprises a peptide sequence of no more than 40 amino acids in length.

[0379] Embodiment 64 comprises an isolated polypeptide or polypeptide complex of any one of embodiments 47-63, wherein P₁ or P₂ comprises at least two cysteine amino acid residues.

[0380] Embodiment 65 comprises an isolated polypeptide or polypeptide complex of any one of embodiments 47-64, wherein P₁ or P₂ comprises a cyclic peptide or a linear peptide.

[0381] Embodiment 66 comprises an isolated polypeptide or polypeptide complex of any one of embodiments 47-65, wherein P₁ or P₂ comprises a cyclic peptide.

[0382] Embodiment 67 comprises an isolated polypeptide or polypeptide complex of any one of embodiments 47-65, wherein P₁ or P₂ comprises a linear peptide.

[0383] Embodiment 68 comprises an isolated polypeptide or polypeptide complex of any one of embodiments 1-67, wherein P₁ comprises at least two cysteine amino acid residues.

[0384] Embodiment 69 comprises an isolated polypeptide or polypeptide complex of any one of embodiments 1-68, wherein P₁ comprises an amino acid sequence according to SEQ ID NO: 26, 27, or 122.

[0385] Embodiment 70 comprises an isolated polypeptide or polypeptide complex of any one of embodiments 47-68, wherein P₂ comprises an amino acid sequence according to any one of SEQ ID NOs: 23-25.

[0386] Embodiment 71 comprises an isolated polypeptide or polypeptide complex of any one of embodiments 47-68, wherein P₂ comprises an amino acid sequence according to X1-X₂-X₃-X₄-C-X₆-X₇-X₈-X₉-X₁₀-C-X₁₂-X₁₃-X₁₄ and X₁ is selected from N, D, S, Y, A, F, H, T, L, and V; X₂ is selected from S, T, D, A, H, V, Y, N, F, I, and L; X₃ is selected from L, I, and V; X₄ is selected from F, L, V, M, W, I, Y, and H; X₆ is selected from V, F, L, I, and W; X₇ is selected from K, R, Q, N, H, and M; X₈ is selected from N and K; X₉ is selected from L, V, and I; X₁₀ is selected from Y, W, F, Q, and L; X₁₂ is selected from W and V; X₁₃ is selected from I, N, H, T, V, Y, and D; X₁₄ is selected from D, V, A, S, I, T, N, Y, H, and P.

[0387] Embodiment 72 comprises an isolated polypeptide or polypeptide complex of embodiment 71, wherein X₁ is selected from N, D, S, Y, A, F, and T; X₂ is selected from S, T, D, A, H, V, Y, and N; X₃ is L; X₄ is selected from F, L, V, M, and W; X₆ is selected from V, F, and L; X₇ is selected from K, R, Q, and N; X₈ is selected from N and K; X₉ is selected from L, V, and I; X₁₀ is selected from Y, W, and F; X₁₂ is W; X₁₃ is selected from I, N, H, and T; X₁₄ is selected from D, V, A, S, I, T, and N.

[0388] Embodiment 73 comprises an isolated polypeptide or polypeptide complex of any one of embodiments 71-72, wherein X₁ is selected from N, D, S, and Y; X₂ is selected from S, T, and D; X₃ is L; X₄ is selected from F, L, and V; X₆ is selected from V and F; X₇ is selected from K, R, and Q; X₈ is N; X₉ is selected from L and V; X₁₀ is selected from Y and W; X₁₂ is W; X₁₃ is selected from I, N, and H; X₁₄ is selected from D, V, A, and S.

[0389] Embodiment 74 comprises an isolated polypeptide or polypeptide complex of any one of embodiments 47-68, wherein P₂ comprises an amino acid sequence according to an amino acid sequence according to J₁-J₂-J₃-C-J₅-J₆-J₇-J₈-W-J₁₀-J₁₁-C-J₁₃-J₁₄ and J₁ is selected from V, I, L, P, E, F, and M; J₂ is selected from D and N; J₃ is selected from F and W; J₈ is selected from A, E, S, R, K, Y, L, Q, G, M, F, T, W, and D; J₆ is selected from L, M, I, V, F, T, R, and S; J₇ is selected from Y, F, and N; J₈ is selected from N, R, D, H, K, Q, S, G, A, E, and M; J₁₀ is selected from P and R; J₁₁ is selected from V and I; J₁₃ is selected from D, G, N, R, S, Q, Y, T, A, E, L, V, K, M, I, H, F, and W; J₁₄ is selected from T, S, Q, L, D, N, A, E, K, M, V, R, I, H, P, V, and W; or P₂ comprises an amino acid sequence according to B₁-B₂-B₃-C-B₈-B₆-B₇-B₈-W-B₁₀-B₁₁-C-B₁₃-B₁₄ and B₁ is selected from V, I, L, P, E, F, and M; B₂ is selected from D and N; B₃ is selected from F and W; B₈ is selected from A, E, S, R, K, Y, L, Q, G, M, F, T, W, and D; B₆ is selected from L, M, I, V, F, T, R, and S; B₇ is selected from Y, F, and N; B₈ is selected from N, R, D, H, K, Q, S, G, A, E, and M; B₁₀ is selected from P and R; B₁₁ is selected from V and I; B₁₃ is selected from D, G, N, R, S, Q, Y, T, A, E, L, V, K, M, I, H, F, and W; B₁₄ is selected from T, S, Q, L, D, N, A, E, K, M, V, R, I, H, P, V, G, and W.

[0390] Embodiment 75 comprises an isolated polypeptide or polypeptide complex of embodiment 74, wherein J₁ is selected from V, I, and L; J₂ is D; J₃ is F; J₈ is selected from A, E, S, R, K, Y, and L; J₆ is selected from L, M, and I; J₇ is Y; J₈ is selected from N, R, D, H, K, Q, S, and G; J₁₀ is P; J₁, is selected from V and I; J₁₃ is selected from D, G, N, R, S, Q, Y, T, and A; J₁₄ is selected from T, S, Q, L, D, N, A, and E; and B₁ is selected from V, I, and L; B₂ is D; B₃ is F; B₈ is selected from A, E, S, R, K, Y, M, G, and L; B₆ is selected from L, M, and I; B₇ is Y; B₈ is selected from N, R, D, H, K, Q, S, and G; B₁₀ is P; B₁₁ is selected from V and I; B₁₃ is selected from D, G, N, R, S, Q, Y, T, H, and A; B₁₄ is selected from T, S, Q, L, D, N, A, G, and E.

[0391] Embodiment 76 comprises an isolated polypeptide or polypeptide complex of any one of embodiments 74-75, wherein J₁ is selected from V, I, and L; J₂ is D; J₃ is F; J₈ is selected from A, E, S, and R; J₆ is selected from L, M, and I; J₇ is Y; J₈ is selected from N, R, and D; J₁₀ is P; J₁₁ is selected from V and I; J₁₃ is selected from D, G, N, R, S, and Q; J₁₄ is selected from T, S, Q, and L; and B₁ is selected from V, I, and L; B₂ is D; B₃ is F; B₈ is selected from A, E, S, K, M, G, and R; B₆ is selected from L, M, and I; B₇ is Y; B₈ is selected from N, R, S, H, and D; B₁₀ is P; B₁₁ is selected from V and I; B₁₃ is selected from D, G, N, R, S, H, A, Y, and Q; B₁₄ is selected from T, S, Q, G, and L.

[0392] Embodiment 77 comprises an isolated polypeptide or polypeptide complex of any one of embodiments 47-68, wherein P₂ comprises the amino acid sequences according to SEQ ID NOs: 133-145.

[0393] Embodiment 78 comprises an isolated polypeptide or polypeptide complex of any one of embodiments 47-68, wherein P₂ comprises the amino acid sequences according to SEQ ID NOs: 146-158.

[0394] Embodiment 79 comprises an isolated polypeptide or polypeptide complex of any one of embodiments 47-68, wherein P₂ comprises an amino acid sequence according to any of the sequences of Table 27.

[0395] Embodiment 80 comprises an isolated polypeptide or polypeptide complex of any one of embodiments 71-73, or 79, wherein P₂ comprises the amino acid sequences according to SEQ ID NOs: 159-178.

[0396] Embodiment 81 comprises an isolated polypeptide or polypeptide complex of any one of embodiments 47-68, wherein P₂ comprises an amino acid sequence according to any of the sequences of Table 29.

[0397] Embodiment 82 comprises an isolated polypeptide or polypeptide complex of any one of embodiments 74-76, or 81, wherein P₂ comprises the amino acid sequences according to SEQ ID NOs: 179-201.

[0398] Embodiment 83 comprises an isolated polypeptide or polypeptide complex of any one of embodiments 74-76, or 81, wherein P₂ comprises the amino acid sequence according to SEQ ID NO: 24 or a peptide sequence that has 1, 2, or 3, amino acid substitutions, additions, or deletions relative to the amino acid sequence of SEQ ID NO: 24.

[0399] Embodiment 84 comprises an isolated polypeptide or polypeptide complex of any one of embodiments 74-76, or 81, wherein P₂ comprises the amino acid sequence according to SEQ ID NO: 181 or a peptide sequence that has 1, 2, or 3, amino acid substitutions, additions, or deletions relative to the amino acid sequence of SEQ ID NO: 181.

[0400] Embodiment 85 comprises an isolated polypeptide or polypeptide complex of any one of embodiments 74-76, or 81, wherein P₂ comprises the amino acid sequence according to SEQ ID NO: 186 or a peptide sequence that has 1, 2, or 3, amino acid substitutions, additions, or deletions relative to the amino acid sequence of SEQ ID NO: 186.

[0401] Embodiment 86 comprises an isolated polypeptide or polypeptide complex of any one of embodiments 74-76, or 81, wherein P₂ comprises the amino acid sequence according to SEQ ID NO: 24.

[0402] Embodiment 87 comprises an isolated polypeptide or polypeptide complex of any one of embodiments 74-76, or 81, wherein P₂ comprises the amino acid sequence according to SEQ ID NO: 181.

[0403] Embodiment 88 comprises an isolated polypeptide or polypeptide complex of any one of embodiments 74-76, or 81, wherein P₂ comprises the amino acid sequence according to SEQ ID NO: 186.

[0404] Embodiment 89 comprises an isolated polypeptide or polypeptide complex of any one of embodiments 1-68 and 70-88, wherein P₁ comprises an amino acid sequence according to Z₁-Z₂-C-Z₄-P-Z₆—Z₇-Z₈-Z₉-Z₁₀-Z₁₁-Z₁₂-C-Z₁₄ and Z₁ is selected from D, Y, F, I, N, V, H, L, A, T, S, and P; Z₂ is selected from D, Y, L, F, I, N, A, V, H, T, and S; Z₄ is selected from G and W; Z₆ is selected from E, D, V, and P; Z₇ is selected from W, L, F, V, G, M, I, and Y; Z₈ is selected from E, D, P, and Q; Z₉ is selected from E, D, Y, V, F, W, P, L, and Q; Z₁₀ is selected from S, D, Y, T, I, F, V, N, A, P, L, and H; Z₁₁ is selected from I, Y, F, V, L, T, N, S, D, A, and H; Z₁₂ is selected from F, D, Y, L, I, V, A, N, T, P, S, and H; Z₁₄ is selected from D, Y, N, F, I, P, V, A, T, H, L and S; or P₁ comprises an amino acid sequence according to U₁-U₂-C-U₄-P-U₆—U₇-U₈-U₉-U₁₀-U₁₁-U₁₂-C-U₁₄ and U₁ is selected from D, Y, F, I, N, V, H, L, A, T, S, and P; U₂ is selected from D, Y, L, F, I, N, A, V, H, T, and S; U₄ is selected from G and W; U₆ is selected from E, D, V, and P; U₇ is selected from W, L, F, V, G, M, I, and Y; U₈ is selected from E, D, P, and Q; U₉ is selected from E, D, Y, V, F, W, P, L, and Q; U₁₀ is selected from S, D, Y, T, I, F, V, N, A, P, L, and H; U₁₁ is selected from I, Y, F, V, L, T, N, S, D, A, and H; U₁₂ is selected from F, D, Y, L, I, V, A, N, T, P, S, G, and H; U₁₄ is selected from D, Y, N, F, I, P, V, A, T, H, L, M, and S.

[0405] Embodiment 90 comprises an isolated polypeptide or polypeptide complex of embodiment 89, wherein Z₁ is selected from D, Y, F, I, and N; Z₂ is selected from D, Y, L, F, I, and N; Z₄ is selected from G and W; Z₆ is selected from E and D; Z₇ is selected from W, L, F, and V; Z₈ is selected from E and D; Z₉ is selected from E, D, Y, and V; Z₁₀ is selected from S, D, Y, T, and I; Z₁ is selected from I, Y, F, V, L, and T; Z₁₂ is selected from F, D, Y, L, I, V, A, and N; Z₁₄ is selected from D, Y, N, F, I, and P; and U₁ is selected from D, Y, F, I, V, and N; U₂ is selected from D, Y, L, F, I, and N; U₄ is selected from G and W; U₆ is selected from E and D; U₇ is selected from W, L, F, G, and V; U₈ is selected from E and D; U₉ is selected from E, D, Y, and V; U₁₀ is selected from S, D, Y, T, and I; U₁₁ is selected from I, Y, F, V, L, and T; U₁₂ is selected from F, D, Y, L, I, V, A, G, and N; U₁₄ is selected from D, Y, N, F, I, M, and P.

[0406] Embodiment 91 comprises an isolated polypeptide or polypeptide complex of any one of embodiments 89-90, wherein Z₁ is selected D, Y, and F; Z₂ is selected from D, Y, L, and F; Z₄ is selected from G and W; Z₆ is selected from E and D; Z₇ is selected from W, L, and F; Z₈ is selected from E and D; Z₉ is selected from E and D; Z₁₀ is selected from S, D, and Y; Z₁ is selected from I, Y, and F; Z₁₂ is selected from F, D, Y, and L; Z₁₄ is selected from D, Y, and N; and U₁ is selected from D, Y, V, and F; U₂ is selected from D, Y, L, and F; U₄ is selected from G and W; U₆ is selected from E and D; U₇ is selected from W, L, G, and F; U₈ is selected from E and D; U₉ is selected from E and D; U₁₀ is selected from S, D, T, and Y; U₁₁ is selected from I, Y, V, L, and F; U₁₂ is selected from F, D, Y, G, A, and L; U₁₄ is selected from D, Y, M, and N.

[0407] Embodiment 92 comprises an isolated polypeptide or polypeptide complex of any one of embodiments 1-68 and 70-88, wherein P₁ comprises the amino acid sequences according to SEQ ID NOs: 202-228.

[0408] Embodiment 93 comprises an isolated polypeptide or polypeptide complex of any one of embodiments 1-68 and 70-88, wherein P₁ comprises an amino acid sequences according to any of the sequences of Table 35.

[0409] Embodiment 94 comprises an isolated polypeptide or polypeptide complex of any one of embodiments 89-91 or 93, wherein P₁ comprises the amino acid sequences according to SEQ ID NOs: 229-240.

[0410] Embodiment 95 comprises an isolated polypeptide or polypeptide complex of any one of embodiments 89-91 or 93, wherein P₁ comprises the amino acid sequence according to SEQ ID NO: 239 or a peptide sequence that has 1, 2, or 3, amino acid substitutions, additions, or deletions relative to the amino acid sequence of SEQ ID NO: 239.

[0411] Embodiment 96 comprises an isolated polypeptide or polypeptide complex of any one of embodiments 89-91 or 93, wherein P₁ comprises the amino acid sequence according to SEQ ID NO: 27 or a peptide sequence that has 1, 2, or 3, amino acid substitutions, additions, or deletions relative to the amino acid sequence of SEQ ID NO: 27.

[0412] Embodiment 97 comprises an isolated polypeptide or polypeptide complex of any one of embodiments 1-68 and 70-88, wherein P₁ comprises the amino acid sequence according to SEQ ID NO: 26 or a peptide sequence that has 1, 2, or 3, amino acid substitutions, additions, or deletions relative to the amino acid sequence of SEQ ID NO: 26.

[0413] Embodiment 98 comprises an isolated polypeptide or polypeptide complex of any one of embodiments 89-91 or 93, wherein P₁ comprises the amino acid sequence according to SEQ ID NO: 239.

[0414] Embodiment 99 comprises an isolated polypeptide or polypeptide complex of any one of embodiments 89-91 or 93, wherein P₁ comprises the amino acid sequence according to SEQ ID NO: 27.

[0415] Embodiment 100 comprises an isolated polypeptide or polypeptide complex of any one of embodiments 1-68 and 70-88, wherein P₁ comprises the amino acid sequence according to SEQ ID NO: 26.

[0416] Embodiment 101 comprises an isolated polypeptide or polypeptide complex of any one of embodiments 1-5, 8-40, and 43-100, wherein L₁ is bound to N-terminus of A₁.

[0417] Embodiment 102 comprises an isolated polypeptide or polypeptide complex of any one of embodiments 1-3, 6-38, and 41-100, wherein L₁ is bound to C-terminus of A₁.

[0418] Embodiment 103 comprises an isolated polypeptide or polypeptide complex of any one of embodiments 1-38, and 41-100, wherein L₂ is bound to N-terminus of A₂.

[0419] Embodiment 104 comprises an isolated polypeptide or polypeptide complex of any one of embodiments 1-40, and 43-100, wherein L₂ is bound to C-terminus of A₂.

[0420] Embodiment 105 comprises an isolated polypeptide or polypeptide complex of any one of embodiments 1-104, wherein L₁ or L₂ is a peptide sequence having at least 5 to no more than 50 amino acids.

[0421] Embodiment 106 comprises an isolated polypeptide or polypeptide complex of any one of embodiments 1-105, wherein L₁ or L₂ is a peptide sequence having at least 10 to no more than 30 amino acids.

[0422] Embodiment 107 comprises an isolated polypeptide or polypeptide complex of any one of embodiments 1-106, wherein L₁ or L₂ is a peptide sequence having at least 10 amino acids.

[0423] Embodiment 108 comprises an isolated polypeptide or polypeptide complex of any one of embodiments 1-107, wherein L₁ or L₂ is a peptide sequence having at least 18 amino acids.

[0424] Embodiment 109 comprises an isolated polypeptide or polypeptide complex of any one of embodiments 1-108, wherein L₁ or L₂ is a peptide sequence having at least 26 amino acids.

[0425] Embodiment 110 comprises an isolated polypeptide or polypeptide complex of any one of embodiments 1-109, wherein L₁ or L₂ has a formula comprising (G₂S)ₙ (SEQ ID NO: 243), wherein n is an integer from 1 to 3.

[0426] Embodiment 111 comprises an isolated polypeptide or polypeptide complex of any one of embodiments 1-109, wherein L₁ has a formula selected from the group consisting of (G₂S)ₙ, (GS)ₙ, (GSGGS)ₙ (SEQ ID NO: 62), (GGGS)ₙ (SEQ ID NO: 63), (GGGGS)ₙ (SEQ ID NO: 64), and (GSSGGS)ₙ (SEQ ID NO: 65), wherein n is an integer of at least 1.

[0427] Embodiment 112 comprises an isolated polypeptide or polypeptide complex of any one of embodiments 1-111, wherein P₁ becomes unbound from A₁ when L₁ is cleaved by the tumor specific protease thereby exposing A₁ to the effector cell antigen.

[0428] Embodiment 113 comprises an isolated polypeptide or polypeptide complex of any one of embodiments 1-112, wherein P₂ becomes unbound from A₂ when L₂ is cleaved by the tumor specific protease thereby exposing A₂ to TROP2.

[0429] Embodiment 114 comprises an isolated polypeptide or polypeptide complex of any one of embodiments 1-113, wherein the tumor specific protease is selected from the group consisting of a matrix metalloprotease (MMP), serine protease, cysteine protease, threonine protease, and aspartic protease.

[0430] Embodiment 115 comprises an isolated polypeptide or polypeptide complex of embodiment 114, wherein the matrix metalloprotease comprises MMP2, MMP7, MMP9, MMP13, or MMP14.

[0431] Embodiment 116 comprises an isolated polypeptide or polypeptide complex of embodiment 114, wherein the serine protease comprises matriptase (MTSP1), urokinase, or hepsin.

[0432] Embodiment 117 comprises an isolated polypeptide or polypeptide complex of any one of embodiments 1-116, wherein L₁ or L₂ comprises a urokinase cleavable amino acid sequence, a matriptase cleavable amino acid sequence, matrix metalloprotease cleavable amino acid sequence, or a legumain cleavable amino acid sequence.

[0433] Embodiment 118 comprises an isolated polypeptide or polypeptide complex of any one of embodiments 1-117, wherein L₁ or L₂ comprises an amino acid sequence according to SEQ ID NO: 31 or 32.

[0434] Embodiment 119 comprises an isolated polypeptide or polypeptide complex of any one of embodiments 1-117, wherein L₁ or L₂ comprises an amino acid sequence according to SEQ ID NO: 58 or 59.

[0435] Embodiment 120 comprises an isolated polypeptide or polypeptide complex of any one of embodiments 1-117, wherein L₁ or L₂ comprises an amino acid sequence according to any one of SEQ ID NOs: 28-61.

[0436] Embodiment 121 comprises an isolated polypeptide or polypeptide complex of any one of embodiments 1-117, wherein L₁ or L₂ comprises an amino acid sequence of Linker 25 (ISSGLLSGRSDAG) (SEQ ID NO: 54), Linker 26 (AAGLLAPPGGLSGRSDAG) (SEQ ID NO: 55), Linker 27 (SPLGLSGRSDAG) (SEQ ID NO: 56), or Linker 28 (LSGRSDAGSPLGLAG) (SEQ ID NO: 57), or an amino acid sequence that has 1, 2, or 3 amino acid substitutions, additions, or deletions relative to the amino acid sequence of Linker 25, Linker 26, Linker 27, or Linker 28.

[0437] Embodiment 122 comprises an isolated polypeptide or polypeptide complex of any one of embodiments 1-121, wherein H₁ comprises a polymer.

[0438] Embodiment 123 comprises an isolated polypeptide or polypeptide complex of embodiment 122, wherein the polymer is polyethylene glycol (PEG).

[0439] Embodiment 124 comprises an isolated polypeptide or polypeptide complex of any one of embodiments 1-121, wherein H₁ comprises albumin.

[0440] Embodiment 125 comprises an isolated polypeptide or polypeptide complex of any one of embodiments 1-121, wherein H₁ comprises an Fc domain.

[0441] Embodiment 126 comprises an isolated polypeptide or polypeptide complex of embodiment 124, wherein the albumin is serum albumin.

[0442] Embodiment 127 comprises an isolated polypeptide or polypeptide complex of embodiment 124, wherein the albumin is human serum albumin.

[0443] Embodiment 128 comprises an isolated polypeptide or polypeptide complex of any one of embodiments 1-121, wherein H₁ comprises a polypeptide, a ligand, or a small molecule.

[0444] Embodiment 129 comprises an isolated polypeptide or polypeptide complex of embodiment 128, wherein the polypeptide, the ligand or the small molecule binds serum protein or a fragment thereof, a circulating immunoglobulin or a fragment thereof, or CD35/CR1.

[0445] Embodiment 130 comprises an isolated polypeptide or polypeptide complex of embodiment 129, wherein the serum protein comprises a thyroxine-binding protein, a transthyretin, a 1-acid glycoprotein, a transferrin, transferrin receptor or a transferrin-binding portion thereof, a fibrinogen, or an albumin.

[0446] Embodiment 131 comprises an isolated polypeptide or polypeptide complex of any one of embodiments 129, wherein the circulating immunoglobulin molecule comprises IgG1, IgG2, IgG3, IgG4, slgA, IgM or IgD.

[0447] Embodiment 132 comprises an isolated polypeptide or polypeptide complex of embodiment 129, wherein the serum protein is albumin.

[0448] Embodiment 133 comprises an isolated polypeptide or polypeptide complex of any one of embodiments 128-132, wherein the polypeptide is an antibody.

[0449] Embodiment 134 comprises an isolated polypeptide or polypeptide complex of embodiment 133, wherein the antibody comprises a single domain antibody, a single chain variable fragment, or a Fab.

[0450] Embodiment 135 comprises an isolated polypeptide or polypeptide complex of embodiment 134, wherein the single domain antibody comprises a single domain antibody that binds to albumin.

[0451] Embodiment 136 comprises an isolated polypeptide or polypeptide complex of any one of embodiments 134-135, wherein the single domain antibody is a human or humanized antibody.

[0452] Embodiment 137 comprises an isolated polypeptide or polypeptide complex of embodiment 134, wherein the single domain antibody is 645gH1gL1.

[0453] Embodiment 138 comprises an isolated polypeptide or polypeptide complex of embodiment 134, wherein the single domain antibody is 645dsgH5gL4.

[0454] Embodiment 139 comprises an isolated polypeptide or polypeptide complex of embodiment 134, wherein the single domain antibody is 23-13-A01-sc02.

[0455] Embodiment 140 comprises an isolated polypeptide or polypeptide complex of embodiment 134, wherein the single domain antibody is A10m3 or a fragment thereof.

[0456] Embodiment 141 comprises an isolated polypeptide or polypeptide complex of embodiment 134, wherein the single domain antibody is DOM7r-31.

[0457] Embodiment 142 comprises an isolated polypeptide or polypeptide complex of embodiment 134, wherein the single domain antibody is DOM7h-11-15.

[0458] Embodiment 143 comprises an isolated polypeptide or polypeptide complex of embodiment 134, wherein the single domain antibody is Alb-1, Alb-8, or Alb-23.

[0459] Embodiment 144 comprises an isolated polypeptide or polypeptide complex of embodiment 134, wherein the single domain antibody is 10E.

[0460] Embodiment 145 comprises an isolated polypeptide or polypeptide complex of embodiment 134, wherein the single domain antibody comprises complementarity determining regions (CDRs): HC-CDR1, HC-CDR2, and HC-CDR3, wherein the HC-CDR1, the HC-CDR2, and the HC-CDR3 of the single domain antibody comprise: HC-CDR1: SEQ ID NO: 66, HC-CDR2: SEQ ID NO: 67, and HC-CDR3: SEQ ID NO: 68.

[0461] Embodiment 146 comprises an isolated polypeptide or polypeptide complex of embodiment 134, wherein the single domain antibody comprises an amino acid sequence according to SEQ ID NO: 69.

[0462] Embodiment 147 comprises an isolated polypeptide or polypeptide complex of embodiment 134, wherein the single domain antibody comprises complementarity determining regions (CDRs): HC-CDR1, HC-CDR2, and HC-CDR3, wherein the HC-CDR1, the HC-CDR2, and the HC-CDR3 of the single domain antibody comprise: HC-CDR1: SEQ ID NO: 70, HC-CDR2: SEQ ID NO: 71, and HC-CDR3: SEQ ID NO: 72.

[0463] Embodiment 148 comprises an isolated polypeptide or polypeptide complex of embodiment 134, wherein the single domain antibody comprises an amino acid sequence according to SEQ ID NO: 73.

[0464] Embodiment 149 comprises an isolated polypeptide or polypeptide complex of embodiment 134, wherein the single domain antibody is SA21.

[0465] Embodiment 150 comprises an isolated polypeptide or polypeptide complex of any one of embodiments 1-149, wherein the isolated polypeptide or polypeptide complex comprises a modified amino acid, a non-natural amino acid, a modified non-natural amino acid, or a combination thereof.

[0466] Embodiment 151 comprises an isolated polypeptide or polypeptide complex of embodiment 150, wherein the modified amino acid or modified non-natural amino acid comprises a post-translational modification.

[0467] Embodiment 152 comprises an isolated polypeptide or polypeptide complex of any one of embodiments 1-151, wherein H₁ comprises a linking moiety (L₃) that connects H₁ to P₁.

[0468] Embodiment 153 comprises an isolated polypeptide or polypeptide complex of embodiment 152, wherein L₃ is a peptide sequence having at least 5 to no more than 50 amino acids.

[0469] Embodiment 154 comprises an isolated polypeptide or polypeptide complex of any one of embodiments 152-153, wherein L₃ is a peptide sequence having at least 10 to no more than 30 amino acids.

[0470] Embodiment 155 comprises an isolated polypeptide or polypeptide complex of any one of embodiments 152-154, wherein L₃ is a peptide sequence having at least 10 amino acids.

[0471] Embodiment 156 comprises an isolated polypeptide or polypeptide complex of any one of embodiments 152-155, wherein L₃ is a peptide sequence having at least 18 amino acids.

[0472] Embodiment 157 comprises an isolated polypeptide or polypeptide complex of any one of embodiments 152-156, wherein L₃ is a peptide sequence having at least 26 amino acids.

[0473] Embodiment 158 comprises an isolated polypeptide or polypeptide complex of any one of embodiments 152-157, wherein L₃ has a formula selected from the group consisting of (G₂S)ₙ, (GS)ₙ, (GSGGS)ₙ (SEQ ID NO: 62), (GGGS)ₙ (SEQ ID NO: 63), (GGGGS)ₙ (SEQ ID NO: 64), and (GSSGGS)ₙ (SEQ ID NO: 65), wherein n is an integer of at least 1.

[0474] Embodiment 159 comprises an isolated polypeptide or polypeptide complex of embodiment 152, wherein L₃ comprises an amino acid sequence according to SEQ ID NO: 30.

[0475] Embodiment 160 comprises an isolated polypeptide or polypeptide complex of embodiment 1, wherein the isolated polypeptide or polypeptide complex comprises an amino acid sequence with at least 95% sequence identity to SEQ ID NOs: 74-132, 241-242.

[0476] Embodiment 161 comprises an isolated polypeptide or polypeptide complex of embodiment 1, wherein the isolated polypeptide or polypeptide complex comprises an amino acid sequence with at least 95% sequence identity to SEQ ID NO: 82.

[0477] Embodiment 162 comprises an isolated polypeptide or polypeptide complex of embodiment 1, wherein the isolated polypeptide or polypeptide complex comprises an amino acid sequence with at least 95% sequence identity to SEQ ID NO: 83.

[0478] Embodiment 163 comprises an isolated polypeptide or polypeptide complex of embodiment 1, wherein the isolated polypeptide or polypeptide complex comprises an amino acid sequence with at least 95% sequence identity to SEQ ID NO: 74 and SEQ ID NO: 75.

[0479] Embodiment 164 comprises an isolated polypeptide or polypeptide complex of embodiment 1, wherein the isolated polypeptide or polypeptide complex comprises an amino acid sequence with at least 95% sequence identity to SEQ ID NO: 76 and SEQ ID NO: 77.

[0480] Embodiment 165 comprises an isolated polypeptide or polypeptide complex of embodiment 1, wherein the isolated polypeptide or polypeptide complex comprises an amino acid sequence with at least 95% sequence identity to SEQ ID NO: 78 and SEQ ID NO: 79.

[0481] Embodiment 166 comprises an isolated polypeptide or polypeptide complex of embodiment 1, wherein the isolated polypeptide or polypeptide complex comprises an amino acid sequence with at least 95% sequence identity to SEQ ID NO: 80 and SEQ ID NO: 81.

[0482] Embodiment 167 comprises an isolated polypeptide or polypeptide complex of embodiment 1, wherein the isolated polypeptide or polypeptide complex comprises an amino acid sequence with at least 95% sequence identity to SEQ ID NO: 82 and SEQ ID NO: 83.

[0483] Embodiment 168 comprises an isolated polypeptide or polypeptide complex of embodiment 1, wherein the isolated polypeptide or polypeptide complex comprises an amino acid sequence with at least 95% sequence identity to SEQ ID NO: 84 and SEQ ID NO: 85.

[0484] Embodiment 169 comprises an isolated polypeptide or polypeptide complex of embodiment 1, wherein the isolated polypeptide or polypeptide complex comprises an amino acid sequence with at least 95% sequence identity to SEQ ID NO: 86 and SEQ ID NO: 87.

[0485] Embodiment 170 comprises an isolated polypeptide or polypeptide complex of embodiment 1, wherein the isolated polypeptide or polypeptide complex comprises an amino acid sequence with at least 95% sequence identity to SEQ ID NO: 88 and SEQ ID NO: 89.

[0486] Embodiment 171 comprises an isolated polypeptide or polypeptide complex of embodiment 1, wherein the isolated polypeptide or polypeptide complex comprises an amino acid sequence with at least 95% sequence identity to SEQ ID NO: 90 and SEQ ID NO: 91.

[0487] Embodiment 172 comprises an isolated polypeptide or polypeptide complex of embodiment 1, wherein the isolated polypeptide or polypeptide complex comprises an amino acid sequence with at least 95% sequence identity to SEQ ID NO: 92 and SEQ ID NO: 93.

[0488] Embodiment 173 comprises an isolated polypeptide or polypeptide complex of embodiment 1, wherein the isolated polypeptide or polypeptide complex comprises an amino acid sequence with at least 95% sequence identity to SEQ ID NO: 94 and SEQ ID NO: 95.

[0489] Embodiment 174 comprises an isolated polypeptide or polypeptide complex of embodiment 1, wherein the isolated polypeptide or polypeptide complex comprises an amino acid sequence with at least 95% sequence identity to SEQ ID NO: 96 and SEQ ID NO: 97.

[0490] Embodiment 175 comprises an isolated polypeptide or polypeptide complex of embodiment 1, wherein the isolated polypeptide or polypeptide complex comprises an amino acid sequence with at least 95% sequence identity to SEQ ID NO: 98 and SEQ ID NO: 99.

[0491] Embodiment 176 comprises an isolated polypeptide or polypeptide complex of embodiment 1, wherein the isolated polypeptide or polypeptide complex comprises an amino acid sequence with at least 95% sequence identity to SEQ ID NO: 100 and SEQ ID NO: 101.

[0492] Embodiment 177 comprises an isolated polypeptide or polypeptide complex of embodiment 1, wherein the isolated polypeptide or polypeptide complex comprises an amino acid sequence with at least 95% sequence identity to SEQ ID NO: 102 and SEQ ID NO: 103.

[0493] Embodiment 178 comprises an isolated polypeptide or polypeptide complex of embodiment 1, wherein the isolated polypeptide or polypeptide complex comprises an amino acid sequence with at least 95% sequence identity to SEQ ID NO: 104 and SEQ ID NO: 105.

[0494] Embodiment 179 comprises an isolated polypeptide or polypeptide complex of embodiment 1, wherein the isolated polypeptide or polypeptide complex comprises an amino acid sequence with at least 95% sequence identity to SEQ ID NO: 106 and SEQ ID NO: 107.

[0495] Embodiment 180 comprises an isolated polypeptide or polypeptide complex of embodiment 1, wherein the isolated polypeptide or polypeptide complex comprises an amino acid sequence with at least 95% sequence identity to SEQ ID NO: 108 and SEQ ID NO: 109.

[0496] Embodiment 181 comprises an isolated polypeptide or polypeptide complex of embodiment 1, wherein the isolated polypeptide or polypeptide complex comprises an amino acid sequence with at least 95% sequence identity to SEQ ID NO: 110 and SEQ ID NO: 111.

[0497] Embodiment 182 comprises an isolated polypeptide or polypeptide complex of embodiment 1, wherein the isolated polypeptide or polypeptide complex comprises an amino acid sequence with at least 95% sequence identity to SEQ ID NO: 112 and SEQ ID NO: 113.

[0498] Embodiment 183 comprises an isolated polypeptide or polypeptide complex of embodiment 1, wherein the isolated polypeptide or polypeptide complex comprises an amino acid sequence with at least 95% sequence identity to SEQ ID NO: 114 and SEQ ID NO: 115.

[0499] Embodiment 184 comprises an isolated polypeptide or polypeptide complex of embodiment 1, wherein the isolated polypeptide or polypeptide complex comprises an amino acid sequence with at least 95% sequence identity to SEQ ID NO: 116 and SEQ ID NO: 117.

[0500] Embodiment 185 comprises an isolated polypeptide or polypeptide complex of embodiment 1, wherein the isolated polypeptide or polypeptide complex comprises an amino acid sequence with at least 95% sequence identity to SEQ ID NO: 118 and SEQ ID NO: 119.

[0501] Embodiment 186 comprises an isolated polypeptide or polypeptide complex of embodiment 1, wherein the isolated polypeptide or polypeptide complex comprises an amino acid sequence with at least 95% sequence identity to SEQ ID NO: 120 and SEQ ID NO: 121.

[0502] Embodiment 187 comprises an isolated polypeptide or polypeptide complex of embodiment 1, wherein the isolated polypeptide or polypeptide complex comprises an amino acid sequence with at least 95% sequence identity to SEQ ID NO: 123 and SEQ ID NO: 124.

[0503] Embodiment 188 comprises an isolated polypeptide or polypeptide complex of embodiment 1, wherein the isolated polypeptide or polypeptide complex comprises an amino acid sequence with at least 95% sequence identity to SEQ ID NO: 125 and SEQ ID NO: 126.

[0504] Embodiment 189 comprises an isolated polypeptide or polypeptide complex of embodiment 1, wherein the isolated polypeptide or polypeptide complex comprises an amino acid sequence with at least 95% sequence identity to SEQ ID NO: 127 and SEQ ID NO: 128.

[0505] Embodiment 190 comprises an isolated polypeptide or polypeptide complex of embodiment 1, wherein the isolated polypeptide or polypeptide complex comprises an amino acid sequence with at least 95% sequence identity to SEQ ID NO: 129 and SEQ ID NO: 130.

[0506] Embodiment 191 comprises an isolated polypeptide or polypeptide complex of embodiment 1, wherein the isolated polypeptide or polypeptide complex comprises an amino acid sequence with at least 95% sequence identity to SEQ ID NO: 241 and SEQ ID NO: 131.

[0507] Embodiment 192 comprises an isolated polypeptide or polypeptide complex of embodiment 1, wherein the isolated polypeptide or polypeptide complex comprises an amino acid sequence with at least 95% sequence identity to SEQ ID NO: 132 and SEQ ID NO: 242.

[0508] Embodiment 193 comprises a pharmaceutical composition comprising: (a) the isolated polypeptide or polypeptide complex of any one of embodiments 1-193; and (b) a pharmaceutically acceptable excipient.

[0509] Embodiment 194 comprises an isolated recombinant nucleic acid molecule encoding the isolated polypeptide or polypeptide complex of any one of embodiments 1-Error! Reference source not found.

[0510] Embodiment 195 comprises an isolated polypeptide or polypeptide complex according to Formula II: L₁ₐ-P₁ₐ-H₁a wherein: L₁ₐ comprises a tumor specific protease-cleaved linking moiety that when uncleaved connects P₁ₐ to a first antigen recognizing molecule that binds to an effector cell antigen and the first antigen recognizing molecule is connected to a second antigen recognizing molecule that binds to TROP2; P₁ₐ comprises a peptide that binds to the first antigen recognizing molecule when L₁ₐ is uncleaved; and H₁ₐ comprises a half-life extending molecule.

[0511] Embodiment 196 comprises an isolated polypeptide or polypeptide complex of embodiment 195, wherein P₁ₐ when L₁ₐ is uncleaved impairs binding of the first antigen recognizing molecule to the effector cell antigen.

[0512] Embodiment 197 comprises an isolated polypeptide or polypeptide complex of any one of embodiments 195-196, wherein the first antigen recognizing molecule comprises an antibody or antibody fragment.

[0513] Embodiment 198 comprises an isolated polypeptide or polypeptide complex of any one of embodiments 195-197, wherein the effector cell antigen is an anti-CD3 effector cell antigen.

[0514] Embodiment 199 comprises an isolated polypeptide or polypeptide complex of any one of embodiments 195-198, wherein P₁ₐ has less than 70% sequence homology to the effector cell antigen.

[0515] Embodiment 200 comprises an isolated polypeptide or polypeptide complex of any one of embodiments 195-199, wherein P₁ₐ comprises a peptide sequence of at least 10 amino acids in length.

[0516] Embodiment 201 comprises an isolated polypeptide or polypeptide complex of any one of embodiments 195-200, wherein P₁ₐ comprises a peptide sequence of at least 10 amino acids in length and no more than 20 amino acids in length.

[0517] Embodiment 202 comprises an isolated polypeptide or polypeptide complex of any one of embodiments 195-201, wherein P₁ₐ comprises a peptide sequence of at least 16 amino acids in length.

[0518] Embodiment 203 comprises an isolated polypeptide or polypeptide complex of any one of embodiments 195-200 and 202, wherein P₁ₐ comprises a peptide sequence of no more than 40 amino acids in length.

[0519] Embodiment 204 comprises an isolated polypeptide or polypeptide complex of any one of embodiments 195-203, wherein P₁ₐ comprises at least two cysteine amino acid residues.

[0520] Embodiment 205 comprises an isolated polypeptide or polypeptide complex of any one of embodiments 195-204, wherein P₁ₐ comprises a cyclic peptide or a linear peptide.

[0521] Embodiment 206 comprises an isolated polypeptide or polypeptide complex of any one of embodiments 195-205, wherein P₁ₐ comprises a cyclic peptide.

[0522] Embodiment 207 comprises an isolated polypeptide or polypeptide complex of any one of embodiments 195-205, wherein P₁ₐ comprises a linear peptide.

[0523] Embodiment 208 comprises an isolated polypeptide or polypeptide complex of any one of embodiments 195-201 and 203-207, wherein P₁ₐ comprises an amino acid sequence selected from the group consisting of SEQ ID NO: 26, 27, or 122.

[0524] Embodiment 209 comprises an isolated polypeptide or polypeptide complex of any one of embodiments 195-201 and 203-207, wherein P₁ₐ comprises an amino acid sequence according to Z₁-Z₂-C-Z₄-P-Z₆-Z₇-Z₈-Z₉-Z₁₀-Z₁₁-Z₁₂-C-Z₁₄ and Z₁ is selected from D, Y, F, I, N, V, H, L, A, T, S, and P; Z₂ is selected from D, Y, L, F, I, N, A, V, H, T, and S; Z₄ is selected from G and W; Z₆ is selected from E, D, V, and P; Z₇ is selected from W, L, F, V, G, M, I, and Y; Z₈ is selected from E, D, P, and Q; Z₉ is selected from E, D, Y, V, F, W, P, L, and Q; Z₁₀ is selected from S, D, Y, T, I, F, V, N, A, P, L, and H; Z₁₁ is selected from I, Y, F, V, L, T, N, S, D, A, and H; Z₁₂ is selected from F, D, Y, L, I, V, A, N, T, P, S, and H; Z₁₄ is selected from D, Y, N, F, I, P, V, A, T, H, L and S; or P₁ₐ comprises an amino acid sequence according to U₁-U₂-C-U₄-P-U₆-U₇-U₈-U₉-U₁₀-U₁₁-U₁₂-C-U₁₄ and U₁ is selected from D, Y, F, I, N, V, H, L, A, T, S, and P; U₂ is selected from D, Y, L, F, I, N, A, V, H, T, and S; U₄ is selected from G and W; U₆ is selected from E, D, V, and P; U₇ is selected from W, L, F, V, G, M, I, and Y; U₈ is selected from E, D, P, and Q; U₉ is selected from E, D, Y, V, F, W, P, L, and Q; U₁₀ is selected from S, D, Y, T, I, F, V, N, A, P, L, and H; U₁₁ is selected from I, Y, F, V, L, T, N, S, D, A, and H; U₁₂ is selected from F, D, Y, L, I, V, A, N, T, P, S, G, and H; U₁₄ is selected from D, Y, N, F, I, P, V, A, T, H, L, M, and S.

[0525] Embodiment 210 comprises an isolated polypeptide or polypeptide complex of embodiment 209, wherein Z₁ is selected from D, Y, F, I, and N; Z₂ is selected from D, Y, L, F, I, and N; Z₄ is selected from G and W; Z₆ is selected from E and D; Z₇ is selected from W, L, F, and V; Z₈ is selected from E and D; Z₉ is selected from E, D, Y, and V; Z₁₀ is selected from S, D, Y, T, and I; Z₁₁ is selected from I, Y, F, V, L, and T; Z₁₂ is selected from F, D, Y, L, I, V, A, and N; Z₁₄ is selected from D, Y, N, F, I, and P; and U₁ is selected from D, Y, F, I, V, and N; U₂ is selected from D, Y, L, F, I, and N; U₄ is selected from G and W; U₆ is selected from E and D; U₇ is selected from W, L, F, G, and V; U₈ is selected from E and D; U₉ is selected from E, D, Y, and V; U₁₀ is selected from S, D, Y, T, and I; U₁₁ is selected from I, Y, F, V, L, and T; U₁₂ is selected from F, D, Y, L, I, V, A, G, and N; U₁₄ is selected from D, Y, N, F, I, M, and P.

[0526] Embodiment 211 comprises an isolated polypeptide or polypeptide complex of any one of embodiments 209-210, wherein Z₁ is selected from D, Y, and F; Z₂ is selected from D, Y, L, and F; Z₄ is selected from G and W; Z₆ is selected from E and D; Z₇ is selected from W, L, and F; Z₈ is selected from E and D; Z₉ is selected from E and D; Z₁₀ is selected from S, D, and Y; Z₁ is selected from I, Y, and F; Z₁₂ is selected from F, D, Y, and L; Z₁₄ is selected from D, Y, and N; and U₁ is selected D, Y, V, and F; U₂ is selected from D, Y, L, and F; U₄ is selected from G and W; U₆ is selected from E and D; U₇ is selected from W, L, G, and F; U₈ is selected from E and D; U₉ is selected from E and D; U₁₀ is selected from S, D, T, and Y; U₁₁ is selected from I, Y, V, L, and F; U₁₂ is selected from F, D, Y, G, A, and L; U₁₄ is selected from D, Y, M, and N.

[0527] Embodiment 212 comprises an isolated polypeptide or polypeptide complex of any one of embodiments 195-201 and 203-207, wherein P₁ₐ comprises the amino acid sequences according to SEQ ID NOs: 202-228.

[0528] Embodiment 213 comprises an isolated polypeptide or polypeptide complex of any one of embodiments 195-201 and 203-207, wherein P₁ₐ comprises an amino acid sequence according to any of the sequences of Table 35.

[0529] Embodiment 214 comprises an isolated polypeptide or polypeptide complex of any one of embodiments 209-211 or 213, wherein P₁ₐ comprises the amino acid sequences according to SEQ ID NOs: 229-240.

[0530] Embodiment 215 comprises an isolated polypeptide or polypeptide complex of any one of embodiments 209-211 or 213, wherein P₁ₐ comprises the amino acid sequence according to SEQ ID NO: 239 or a peptide sequence that has 1, 2, or 3, amino acid substitutions, additions, or deletions relative to the amino acid sequence of SEQ ID NO: 239.

[0531] Embodiment 216 comprises an isolated polypeptide or polypeptide complex of any one of embodiments 209-211 or 213, wherein P₁ₐ comprises the amino acid sequence according to SEQ ID NO: 27 or a peptide sequence that has 1, 2, or 3, amino acid substitutions, additions, or deletions relative to the amino acid sequence of SEQ ID NO: 27.

[0532] Embodiment 216 comprises an isolated polypeptide or polypeptide complex of any one of embodiments 195-201 and 203-207 wherein P₁ₐ comprises the amino acid sequence according to SEQ ID NO: 26 or a peptide sequence that has 1, 2, or 3, amino acid substitutions, additions, or deletions relative to the amino acid sequence of SEQ ID NO: 26.

[0533] Embodiment 218 comprises an isolated polypeptide or polypeptide complex of any one of embodiments 209-211 or 213, wherein P₁ₐ comprises the amino acid sequence according to SEQ ID NO: 239.

[0534] Embodiment 219 comprises an isolated polypeptide or polypeptide complex of any one of embodiments 209-211 or 213, wherein P₁ₐ comprises the amino acid sequence according to SEQ ID NO: 27.

[0535] Embodiment 220 comprises an isolated polypeptide or polypeptide complex of any one of embodiments 195-201 and 203-207, wherein P₁ₐ comprises the amino acid sequence according to SEQ ID NO: 26.

[0536] Embodiment 221 comprises an isolated polypeptide or polypeptide complex of any one of embodiments 195-220, wherein H₁ₐ comprises a polymer.

[0537] Embodiment 222 comprises an isolated polypeptide or polypeptide complex of embodiment 221, wherein the polymer is polyethylene glycol (PEG).

[0538] Embodiment 223 comprises an isolated polypeptide or polypeptide complex of any one of embodiments 195-221, wherein H₁ₐ comprises albumin.

[0539] Embodiment 224 comprises an isolated polypeptide or polypeptide complex of any one of embodiments 195-221, wherein H₁ₐ comprises an Fc domain.

[0540] Embodiment 225 comprises an isolated polypeptide or polypeptide complex of embodiment 223, wherein the albumin is serum albumin.

[0541] Embodiment 226 comprises an isolated polypeptide or polypeptide complex of embodiment 223, wherein the albumin is human serum albumin.

[0542] Embodiment 227 comprises an isolated polypeptide or polypeptide complex of any one of embodiments 195-220, wherein H₁ₐ comprises a polypeptide, a ligand, or a small molecule.

[0543] Embodiment 228 comprises an isolated polypeptide or polypeptide complex of embodiment 227, wherein the polypeptide, the ligand or the small molecule binds a serum protein or a fragment thereof, a circulating immunoglobulin or a fragment thereof, or CD35/CR1.

[0544] Embodiment 229 comprises an isolated polypeptide or polypeptide complex of embodiment 228, wherein the serum protein comprises a thyroxine-binding protein, a transthyretin, a 1-acid glycoprotein, a transferrin, transferrin receptor or a transferrin-binding portion thereof, a fibrinogen, or an albumin.

[0545] Embodiment 230 comprises an isolated polypeptide or polypeptide complex of embodiment 228, wherein the circulating immunoglobulin molecule comprises IgG1, IgG2, IgG3, IgG4, slgA, IgM or IgD.

[0546] Embodiment 231 comprises an isolated polypeptide or polypeptide complex of any one of embodiments 228-229, wherein the serum protein is albumin.

[0547] Embodiment 232 comprises an isolated polypeptide or polypeptide complex of any one of embodiments 227-231, wherein the polypeptide is an antibody.

[0548] Embodiment 233 comprises an isolated polypeptide or polypeptide complex of embodiment 232, wherein the antibody comprises a single domain antibody, a single chain variable fragment or a Fab.

[0549] Embodiment 234 comprises an isolated polypeptide or polypeptide complex of any one of embodiments 232-233, wherein the antibody comprises a single domain antibody that binds to albumin.

[0550] Embodiment 235 comprises an isolated polypeptide or polypeptide complex of any one of embodiments 232-234, wherein the antibody is a human or humanized antibody.

[0551] Embodiment 236 comprises an isolated polypeptide or polypeptide complex of embodiment 233, wherein the single domain antibody is 645gH1gL1.

[0552] Embodiment 237 comprises an isolated polypeptide or polypeptide complex of embodiment 233, wherein the single domain antibody is 645dsgH5gL4.

[0553] Embodiment 238 comprises an isolated polypeptide or polypeptide complex of embodiment 233, wherein the single domain antibody is 23-13-A01-sc02.

[0554] Embodiment 239 comprises an isolated polypeptide or polypeptide complex of embodiment 233, wherein the single domain antibody is A10m3 or a fragment thereof.

[0555] Embodiment 240 comprises an isolated polypeptide or polypeptide complex of embodiment 233, wherein the single domain antibody is DOM7r-31.

[0556] Embodiment 241 comprises an isolated polypeptide or polypeptide complex of embodiment 233, wherein the single domain antibody is DOM7h-11-15.

[0557] Embodiment 242 comprises an isolated polypeptide or polypeptide complex of embodiment 233, wherein the single domain antibody is Alb-1, Alb-8, or Alb-23.

[0558] Embodiment 243 comprises an isolated polypeptide or polypeptide complex of embodiment 233, wherein the single domain antibody is 10E.

[0559] Embodiment 244 comprises an isolated polypeptide or polypeptide complex of embodiment 233, wherein the single domain antibody comprises complementarity determining regions (CDRs): HC-CDR1, HC-CDR2, and HC-CDR3, wherein the HC-CDR1, the HC-CDR2, and the HC-CDR3 of the single domain antibody comprise: HC-CDR1: SEQ ID NO: 66, HC-CDR2: SEQ ID NO: 67, and HC-CDR3: SEQ ID NO: 68.

[0560] Embodiment 245 comprises an isolated polypeptide or polypeptide complex of embodiment 233, wherein the single domain antibody comprises an amino acid sequence according to SEQ ID NO: 69.

[0561] Embodiment 246 comprises an isolated polypeptide or polypeptide complex of embodiment 233, wherein the single domain antibody comprises complementarity determining regions (CDRs): HC-CDR1, HC-CDR2, and HC-CDR3, wherein the HC-CDR1, the HC-CDR2, and the HC-CDR3 of the single domain antibody comprise: HC-CDR1: SEQ ID NO: 70, HC-CDR2: SEQ ID NO: 71, and HC-CDR3: SEQ ID NO: 72.

[0562] Embodiment 247 comprises an isolated polypeptide or polypeptide complex of embodiment 233, wherein the single domain antibody comprises an amino acid sequence according to SEQ ID NO: 73.

[0563] Embodiment 248 comprises an isolated polypeptide or polypeptide complex of embodiment 233, wherein the single domain antibody is SA21.

[0564] Embodiment 249 comprises an isolated polypeptide or polypeptide complex of any one of embodiments 195-248, wherein H₁ₐ comprises a linking moiety (L₁ₐ) that connects H₁ₐ to Pia.

[0565] Embodiment 250 comprises an isolated polypeptide or polypeptide complex of embodiment 249, wherein L₁ₐ is a peptide sequence having at least 5 to no more than 50 amino acids.

[0566] Embodiment 251 comprises an isolated polypeptide or polypeptide complex of any one of embodiments 249-250, wherein L₁ₐ is a peptide sequence having at least 10 to no more than 30 amino acids.

[0567] Embodiment 252 comprises an isolated polypeptide or polypeptide complex of any one of embodiments 249-251, wherein L₁ₐ is a peptide sequence having at least 10 amino acids.

[0568] Embodiment 253 comprises an isolated polypeptide or polypeptide complex of any one of embodiments 249-252, wherein L₁ₐ is a peptide sequence having at least 18 amino acids.

[0569] Embodiment 254 comprises an isolated polypeptide or polypeptide complex of any one of embodiments 249-253, wherein L₁ₐ is a peptide sequence having at least 26 amino acids.

[0570] Embodiment 255 comprises an isolated polypeptide or polypeptide complex of any one of embodiments 249-254, wherein L₁ₐ has a formula selected from the group consisting of (G₂S)ₙ, (GS)ₙ, (GSGGS)ₙ (SEQ ID NO: 62), (GGGS)ₙ (SEQ ID NO: 63), (GGGGS)ₙ (SEQ ID NO: 64), and (GSSGGS)ₙ (SEQ ID NO: 65), wherein n is an integer of at least 1.

[0571] Embodiment 256 comprises an isolated polypeptide or polypeptide complex of embodiment 249, wherein L₁ₐ comprises an amino acid sequence according to any one of SEQ ID NOs: 28-61.

[0572] Embodiment 257 comprises a polypeptide complex comprising a structural arrangement according to Configuration 1:

wherein the polypeptide complex comprises a single chain variable fragment (scFv) comprising a light chain variable domain and a heavy chain variable domain, wherein the scFv further comprises a peptide that impairs binding of the scFv to an effector cell antigen and the peptide is linked to a N-terminus of the heavy chain variable domain of the scFv with a linking moiety that is a substrate for a tumor specific protease, and the peptide further comprises a half-life extending molecule; and a Fab that binds to TROP2, wherein the Fab comprises a Fab light chain polypeptide and a Fab heavy chain polypeptide, wherein the Fab heavy chain polypeptide is linked to a C terminus of the light chain variable domain of the scFv, and wherein the Fab further comprises P₂ and L₂, wherein P₂ comprises a peptide that impairs binding to TROP2; and L₂ comprises a linking moiety that connects the Fab light chain polypeptide to P₂ and is a substrate for a tumor specific protease.

[0573] Embodiment 258 comprises a polypeptide complex comprising a structural arrangement according to Configuration 2:

wherein the polypeptide complex comprises a single chain variable fragment (scFv) comprising a light chain variable domain and a heavy chain variable domain, wherein the scFv further comprises a peptide that impairs binding of the scFv to an effector cell antigen and the peptide is linked to a N-terminus of the heavy chain variable domain of the scFv with a linking moiety that is a substrate for a tumor specific protease, and the peptide further comprises a half-life extending molecule; and a Fab that binds to TROP2, wherein the Fab comprises a Fab light chain polypeptide and a Fab heavy chain polypeptide, wherein the Fab light chain polypeptide is linked to a C terminus of the light chain variable domain of the scFv, and wherein the Fab further comprises P₂ and L₂, wherein P₂ comprises a peptide that impairs binding to TROP2; and L₂ comprises a linking moiety that connects the Fab heavy chain polypeptide to P₂ and is a substrate for a tumor specific protease.

[0574] Embodiment 259 comprises an isolated polypeptide or polypeptide complex comprising an anti-TROP2 binding domain that is linked to a peptide that impairs binding of the anti-TROP2 binding to TROP2 wherein the peptide comprises an amino acid sequence according to X₁-X₂-X₃-X₄-C-X₆-X₇-X₈-X₉-X₁₀-C-X₁₂-X₁₃-X₁₄ and X₁ is selected from N, D, S, Y, A, F, H, T, L, and V; X₂ is selected from S, T, D, A, H, V, Y, N, F, I, and L; X₃ is selected from L, I, and V; X₄ is selected from F, L, V, M, W, I, Y, and H; X₆ is selected from V, F, L, I, and W; X₇ is selected from K, R, Q, N, H, and M; X₈ is selected from N and K; X₉ is selected from L, V, and I; X₁₀ is selected from Y, W, F, Q, and L; X₁₂ is selected from W and V; X₁₃ is selected from I, N, H, T, V, Y, and D; X₁₄ is selected from D, V, A, S, I, T, N, Y, H, and P; or the peptide comprises an amino acid according to J₁-J₂-J₃-C-J₅-J₆-J₇-J₈-W-J₁₀-J₁₁-C-J₁₃-J₁₄ and J₁ is selected from V, I, L, P, E, F, and M; J₂ is selected from D and N; J₃ is selected from F and W; J₅ is selected from A, E, S, R, K, Y, L, Q, G, M, F, T, W, and D; J₆ is selected from L, M, I, V, F, T, R, and S; J₇ is selected from Y, F, and N; J₈ is selected from N, R, D, H, K, Q, S, G, A, E, and M; J₁₀ is selected from P and R; J₁₁ is selected from V and I; J₁₃ is selected from D, G, N, R, S, Q, Y, T, A, E, L, V, K, M, I, H, F, and W; J₁₄ is selected from T, S, Q, L, D, N, A, E, K, M, V, R, I, H, P, V, and W; or the peptide comprises an amino acid sequence according to B₁-B₂-B₃-C-B₅-B₆-B₇-Bg-W-B₁₀-B₁₁-C-B₁₃-B₁₄ and B₁ is selected from V, I, L, P, E, F, and M; B₂ is selected from D and N; B₃ is selected from F and W; B₅ is selected from A, E, S, R, K, Y, L, Q, G, M, F, T, W, and D; B₆ is selected from L, M, I, V, F, T, R, and S; B₇ is selected from Y, F, and N; B₈ is selected from N, R, D, H, K, Q, S, G, A, E, and M; B₁₀ is selected from P and R; B₁₁ is selected from V and I; B₁₃ is selected from D, G, N, R, S, Q, Y, T, A, E, L, V, K, M, I, H, F, and W; B₁₄ is selected from T, S, Q, L, D, N, A, E, K, M, V, R, I, H, P, V, G, and W.

[0575] Embodiment 260 comprises an isolated polypeptide or polypeptide complex of embodiment 259, wherein X₁ is selected from N, D, S, Y, A, F, and T; X₂ is selected from S, T, D, A, H, V, Y, and N; X₃ is L; X₄ is selected from F, L, V, M, and W; X₆ is selected from V, F, and L; X₇ is selected from K, R, Q, and N; X₈ is selected from N and K; X₉ is selected from L, V, and I; X₁₀ is selected from Y, W, and F; X₁₂ is W; X₁₃ is selected from I, N, H, and T; X₁₄ is selected from D, V, A, S, I, T, and N.

[0576] Embodiment 261 comprises an isolated polypeptide or polypeptide complex of any one of embodiments 259-260, wherein X₁ is selected from N, D, S, and Y; X₂ is selected from S, T, and D; X₃ is L; X₄ is selected from F, L, and V; X₆ is selected from V and F; X₇ is selected from K, R, and Q; X₈ is N; X₉ is selected from L and V; X₁₀ is selected from Y and W; X₁₂ is W; X₁₃ is selected from I, N, and H; X₁₄ is selected from D, V, A, and S.

[0577] Embodiment 262 comprises an isolated polypeptide or polypeptide complex of any one of embodiments 259-261, wherein J₁ is selected V, I, and L; J₂ is D; J₃ is F; J₈ is selected from A, E, S, R, K, Y, and L; J₆ is selected from L, M, and I; J₇ is Y; J₈ is selected from N, R, D, H, K, Q, S, and G; J₁₀ is P; J₁₁ is selected from V and I; J₁₃ is selected from D, G, N, R, S, Q, Y, T, and A; J₁₄ is selected from T, S, Q, L, D, N, A, and E.

[0578] Embodiment 263 comprises an isolated polypeptide or polypeptide complex of any one of embodiments 259-262, wherein J₁ is selected from V, I, and L; J₂ is D; J₃ is F; J₈ is selected from A, E, S, and R; J₆ is selected from L, M, and I; J₇ is Y; J₈ is selected from N, R, and D; J₁₀ is P; J₁₁ is selected from V and I; J₁₃ is selected from D, G, N, R, S, and Q; J₁₄ is selected from T, S, Q, and L.

[0579] Embodiment 264 comprises an isolated polypeptide or polypeptide complex of embodiment 259, wherein B₁ is selected from V, I, and L; B₂ is D; B₃ is F; B₅ is selected from A, E, S, R, K, Y, M, G, and L; B₆ is selected from L, M, and I; B₇ is Y; B₈ is selected from N, R, D, H, K, Q, S, and G; B₁₀ is P; B₁₁ is selected from V and I; B₁₃ is selected from D, G, N, R, S, Q, Y, T, H, and A; B₁₄ is selected from T, S, Q, L, D, N, A, G, and E.

[0580] Embodiment 265 comprises an isolated polypeptide or polypeptide complex of embodiment 264, wherein B₁ is selected from V, I, and L; B₂ is D; B₃ is F; B₅ is selected from A, E, S, K, M, G, and R; B₆ is selected from L, M, and I; B₇ is Y; B₈ is selected from N, R, S, H, and D; B₁₀ is P; B₁₁ is selected from V and I; B₁₃ is selected from D, G, N, R, S, H, A, Y, and Q; B₁₄ is selected from T, S, Q, G, and L.

[0581] Embodiment 266 comprises an isolated polypeptide or polypeptide complex of embodiment 259, wherein the peptide comprises an amino acid sequence according to any of the sequences of Table 27.

[0582] Embodiment 267 comprises an isolated polypeptide or polypeptide complex of any one of embodiments 259-261, or 266, wherein the peptide comprises the amino acid sequences according to SEQ ID NOs: 159-178.

[0583] Embodiment 268 comprises an isolated polypeptide or polypeptide complex of embodiment 259, wherein the peptide comprises an amino acid sequences according to any of the sequences of Table 29.

[0584] Embodiment 269 comprises an isolated polypeptide or polypeptide complex of any one of embodiments 259, 262-265, wherein the peptide comprises the amino acid sequences according to SEQ ID NOs: 179-201.

[0585] Embodiment 270 comprises an isolated polypeptide or polypeptide complex of any one of embodiments 259, 264-265, wherein the peptide comprises the amino acid sequence according to SEQ ID NO: 24 or a peptide sequence that has 1, 2, or 3, amino acid substitutions, additions, or deletions relative to the amino acid sequence of SEQ ID NO: 24.

[0586] Embodiment 271 comprises an isolated polypeptide or polypeptide complex of any one of embodiments 259, 264-265, wherein the peptide comprises the amino acid sequence according to SEQ ID NO: 181 or a peptide sequence that has 1, 2, or 3, amino acid substitutions, additions, or deletions relative to the amino acid sequence of SEQ ID NO: 181.

[0587] Embodiment 272 comprises an isolated polypeptide or polypeptide complex of any one of embodiments 259, 264-265, wherein the peptide comprises the amino acid sequence according to SEQ ID NO: 186 or a peptide sequence that has 1, 2, or 3, amino acid substitutions, additions, or deletions relative to the amino acid sequence of SEQ ID NO: 186.

[0588] Embodiment 273 comprises an isolated polypeptide or polypeptide complex of any one of embodiments 259, 264-265, wherein the peptide comprises the amino acid sequence according to SEQ ID NO: 24.

[0589] Embodiment 274 comprises an isolated polypeptide or polypeptide complex of any one of embodiments 259, 264-265, wherein the peptide comprises the amino acid sequence according to SEQ ID NO: 181.

[0590] Embodiment 275 comprises an isolated polypeptide or polypeptide complex of any one of embodiments 259, 264-265, wherein the peptide comprises the amino acid sequence according to SEQ ID NO: 186.

[0591] Embodiment 276 comprises an isolated polypeptide or polypeptide complex of any one of embodiments 259-275, wherein the anti-TROP2 binding domain comprises an antibody or an antibody fragment.

[0592] Embodiment 277 comprises an isolated polypeptide or polypeptide complex of embodiment 276, wherein the antibody or antibody fragment comprises a single chain variable fragment, a single domain antibody, Fab, or Fab′.

[0593] Embodiment 278 comprises an isolated polypeptide or polypeptide complex of any one of embodiments 276-277, wherein the anti-TROP2 binding domain comprises heavy chain complementarity determining regions HC-CDR1, HC-CDR2, and HC-CDR3, wherein the HC-CDR1, the HC-CDR2, and the HC-CDR3 comprise: HC-CDR1: SEQ ID NO: 15, HC-CDR2: SEQ ID NO: 16, and HC-CDR3: SEQ ID NO: 17; and the anti-TROP2 binding domain comprises light chain complementarity determining regions CDRs: LC-CDR1, LC-CDR2, and LC-CDR3, wherein the LC-CDR1, the LC-CDR2, and the LC-CDR3 of the Fab comprise LC-CDR1: SEQ ID NO: 18, LC-CDR2: SEQ ID NO:19, and LC-CDR3: SEQ ID NO: 20.

[0594] Embodiment 279 comprises an isolated polypeptide or polypeptide complex of embodiment 277, wherein the antibody or antibody fragment comprises the Fab.

[0595] Embodiment 280 comprises an isolated polypeptide or polypeptide complex of any one of embodiments 259-279, wherein the anti-TROP2 binding domain comprises amino acid sequences according to SEQ ID NOs: 21-22.

[0596] Embodiment 281 comprises an isolated polypeptide or polypeptide complex of embodiment 280, wherein the antibody or antibody fragment comprises the Fab or Fab′.

[0597] Embodiment 282 comprises an isolated polypeptide or polypeptide complex of any one of embodiments 259-280, wherein the isolated polypeptide or polypeptide complex further comprises a half-life extending molecule (H₁).

[0598] Embodiment 283 comprises an isolated polypeptide or polypeptide complex of embodiment 282, wherein the half-life extending molecule is linked to the peptide.

[0599] Embodiment 284 comprises an isolated polypeptide or polypeptide complex of any one of embodiments 282-283, wherein H₁ comprises a polymer.

[0600] Embodiment 285 comprises an isolated polypeptide or polypeptide complex of embodiment 284, wherein the polymer is polyethylene glycol (PEG).

[0601] Embodiment 286 comprises an isolated polypeptide or polypeptide complex of any one of embodiments 282-284, wherein H₁ comprises albumin.

[0602] Embodiment 287 comprises an isolated polypeptide or polypeptide complex of any one of embodiments 282-284, wherein H₁ comprises an Fc domain.

[0603] Embodiment 288 comprises an isolated polypeptide or polypeptide complex of embodiment 286, wherein the albumin is serum albumin.

[0604] Embodiment 289 comprises an isolated polypeptide or polypeptide complex of embodiment 286, wherein the albumin is human serum albumin.

[0605] Embodiment 290 comprises an isolated polypeptide or polypeptide complex of any one of embodiments 282-283, wherein H₁ comprises a polypeptide, a ligand, or a small molecule.

[0606] Embodiment 291 comprises an isolated polypeptide or polypeptide complex of embodiment 290, wherein the polypeptide, the ligand or the small molecule binds serum protein or a fragment thereof, a circulating immunoglobulin or a fragment thereof, or CD35/CR1.

[0607] Embodiment 292 comprises an isolated polypeptide or polypeptide complex of embodiment 291, wherein the serum protein comprises a thyroxine-binding protein, a transthyretin, a 1-acid glycoprotein, a transferrin, transferrin receptor or a transferrin-binding portion thereof, a fibrinogen, or an albumin.

[0608] Embodiment 293 comprises an isolated polypeptide or polypeptide complex of embodiment 291, wherein the circulating immunoglobulin molecule comprises IgG1, IgG2, IgG3, IgG4, slgA, IgM or IgD.

[0609] Embodiment 294 comprises an isolated polypeptide or polypeptide complex of any one of embodiments 291-292, wherein the serum protein is albumin.

[0610] Embodiment 295 comprises an isolated polypeptide or polypeptide complex of any one of embodiments 290-294, wherein the polypeptide is an antibody.

[0611] Embodiment 296 comprises an isolated polypeptide or polypeptide complex of embodiment 295, wherein the antibody comprises a single domain antibody, a single chain variable fragment, or a Fab.

[0612] Embodiment 297 comprises an isolated polypeptide or polypeptide complex of embodiment 296, wherein the single domain antibody comprises a single domain antibody that binds to albumin.

[0613] Embodiment 298 comprises an isolated polypeptide or polypeptide complex of any one of embodiments 296-297, wherein the single domain antibody is a human or humanized antibody.

[0614] Embodiment 299 comprises an isolated polypeptide or polypeptide complex of embodiment 296, wherein the single domain antibody is 645gH1gL1.

[0615] Embodiment 300 comprises an isolated polypeptide or polypeptide complex of embodiment 296, wherein the single domain antibody is 645dsgH5gL4.

[0616] Embodiment 301 comprises an isolated polypeptide or polypeptide complex of embodiment 296, wherein the single domain antibody is 23-13-A01-sc02.

[0617] Embodiment 302 comprises an isolated polypeptide or polypeptide complex of embodiment 296, wherein the single domain antibody is A10m3 or a fragment thereof.

[0618] Embodiment 303 comprises an isolated polypeptide or polypeptide complex of embodiment 296, wherein the single domain antibody is DOM7r-31.

[0619] Embodiment 304 comprises an isolated polypeptide or polypeptide complex of embodiment 296, wherein the single domain antibody is DOM7h-11-15.

[0620] Embodiment 305 comprises an isolated polypeptide or polypeptide complex of embodiment 296, wherein the single domain antibody is Alb-1, Alb-8, or Alb-23.

[0621] Embodiment 306 comprises an isolated polypeptide or polypeptide complex of embodiment 296, wherein the single domain antibody is 10E.

[0622] Embodiment 307 comprises an isolated polypeptide or polypeptide complex of embodiment 296, wherein the single domain antibody comprises complementarity determining regions (CDRs): HC-CDR1, HC-CDR2, and HC-CDR3, wherein the HC-CDR1, the HC-CDR2, and the HC-CDR3 of the single domain antibody comprise: HC-CDR1: SEQ ID NO: 66, HC-CDR2: SEQ ID NO: 67, and HC-CDR3: SEQ ID NO: 68.

[0623] Embodiment 308 comprises an isolated polypeptide or polypeptide complex of embodiment 296, wherein the single domain antibody comprises an amino acid sequence according to SEQ ID NO: 69.

[0624] Embodiment 309 comprises an isolated polypeptide or polypeptide complex of embodiment 296, wherein the single domain antibody comprises complementarity determining regions (CDRs): HC-CDR1, HC-CDR2, and HC-CDR3, wherein the HC-CDR1, the HC-CDR2, and the HC-CDR3 of the single domain antibody comprise: HC-CDR1: SEQ ID NO: 70, HC-CDR2: SEQ ID NO: 71, and HC-CDR3: SEQ ID NO: 72.

[0625] Embodiment 310 comprises an isolated polypeptide or polypeptide complex of embodiment 296, wherein the single domain antibody comprises an amino acid sequence according to SEQ ID NO: 73.

[0626] Embodiment 311 comprises an isolated polypeptide or polypeptide complex of embodiment 296, wherein the single domain antibody is SA21.

[0627] Embodiment 312 comprises an isolated polypeptide or polypeptide complex of any one of embodiments 259-311, wherein the isolated polypeptide or polypeptide complex comprises a modified amino acid, a non-natural amino acid, a modified non-natural amino acid, or a combination thereof.

[0628] Embodiment 313 comprises an isolated polypeptide or polypeptide complex of embodiment 312, wherein the modified amino acid or modified non-natural amino acid comprises a post-translational modification.

[0629] Embodiment 314 comprises an isolated polypeptide or polypeptide complex of any one of embodiments 282-313, wherein H₁ comprises a linking moiety (L₃) that connects H₁ to the peptide.

[0630] Embodiment 315 comprises an isolated polypeptide or polypeptide complex of embodiment 314, wherein L₃ is a peptide sequence having at least 5 to no more than 50 amino acids.

[0631] Embodiment 316 comprises an isolated polypeptide or polypeptide complex of any one of embodiments 314-315, wherein L₃ is a peptide sequence having at least 10 to no more than 30 amino acids.

[0632] Embodiment 317 comprises an isolated polypeptide or polypeptide complex of any one of embodiments 314-315, wherein L₃ is a peptide sequence having at least 10 amino acids.

[0633] Embodiment 318 comprises an isolated polypeptide or polypeptide complex of any one of embodiments 314-317, wherein L₃ is a peptide sequence having at least 18 amino acids.

[0634] Embodiment 319 comprises an isolated polypeptide or polypeptide complex of any one of embodiments 314-318, wherein L₃ is a peptide sequence having at least 26 amino acids.

[0635] Embodiment 320 comprises an isolated polypeptide or polypeptide complex of any one of embodiments 314-319, wherein L₃ has a formula selected from the group consisting of (G₂S)ₙ, (GS)ₙ, (GSGGS)ₙ (SEQ ID NO: 62), (GGGS)ₙ (SEQ ID NO: 63), (GGGGS)ₙ (SEQ ID NO: 64), and (GSSGGS) (SEQ ID NO: 65), wherein n is an integer of at least 1.

[0636] Embodiment 321 comprises an isolated polypeptide or polypeptide complex of any one of embodiments 314-315, wherein L₃ comprises an amino acid sequence according to SEQ ID NO: 30.

[0637] Embodiment 322 comprises a method of treating triple-negative breast cancer comprising administering to a subject in need thereof an isolated polypeptide or polypeptide complex according to Embodiments 1-192, or 257-321.

[0638] Embodiment 323 comprises a method of treating urothelial cancer comprising administering to a subject in need thereof an isolated polypeptide or polypeptide complex according to Embodiments 1-192, or 257-321.

[0639] Embodiment 324 comprises a method of treating non-small cell lung cancer (NSCLC) comprising administering to a subject in need thereof an isolated polypeptide or polypeptide complex according to Embodiments 1-192, or 257-321.

[0640] Embodiment 325 comprises a method of treating small cell lung cancer (SCLC) comprising administering to a subject in need thereof an isolated polypeptide or polypeptide complex according to Embodiments 1-192, or 257-321.

[0641] Embodiment 326 comprises a method of treating gastric cancer comprising administering to a subject in need thereof an isolated polypeptide or polypeptide complex according to Embodiments 1-192, or 257-321.

[0642] Embodiment 327 comprises a method of treating esophageal cancer comprising administering to a subject in need thereof an isolated polypeptide or polypeptide complex according to Embodiments 1-192, or 257-321.

[0643] Embodiment 328 comprises a method of treating head and neck cancer comprising administering to a subject in need thereof an isolated polypeptide or polypeptide complex according to Embodiments 1-192, or 257-321.

[0644] Embodiment 329 comprises a method of treating prostate cancer comprising administering to a subject in need thereof an isolated polypeptide or polypeptide complex according to Embodiments 1-192, or 257-321.

[0645] Embodiment 330 comprises a method of treating endometrial cancer comprising administering to a subject in need thereof an isolated polypeptide or polypeptide complex according to Embodiments 1-192, or 257-321.

[0646] Embodiment 331 comprises a method of treating breast cancer comprising administering to a subject in need thereof an isolated polypeptide or polypeptide complex according to Embodiments 1-192, or 257-321.

[0647] Embodiment 332 comprises a method of treating colon cancer comprising administering to a subject in need thereof an isolated polypeptide or polypeptide complex according to Embodiments 1-192, or 257-321.

[0648] Embodiment 333 comprises a method of treating glioma comprising administering to a subject in need thereof an isolated polypeptide or polypeptide complex according to Embodiments 1-192, or 257-321.

### EXAMPLES

### Example 1: TROP2 Polypeptide Complex Binding

[0649] The TROP2-CD3 polypeptide complexes of Table 7 were evaluated for TROP2 and CD3ε binding.

TABLE 7
Polypeptide complexes

| Polypeptide | | | | CD3 | | |
|---|---|---|---|---|---|---|
| complex | Form | Fab Mask | CD3 | Mask | Cleavable linker | sdA |
| PC1 | Vh | Non masked, SEQ ID NO. 13 (normal orientation) | | | | |
| PC5 | Vh | SEQ ID | SEQ ID NO. | SEQ ID | LSGRSDAGSPLGLAG | SEQ ID |
| | | NO. 24 | 13 | NO. 27 | (SEQ ID NO: 57) | NO: 69 |
| PC6 | Vh | SEQ ID | SEQ ID NO. | SEQ ID | LSGRSDAGSPLGLAG | SEQ ID |
| | | NO. 23 | 13 | NO. 27 | (SEQ ID NO: 57) | NO: 69 |
| PC2 | Vl | Non masked, SEQ ID NO. 13 (flipped orientation) | | | | |
| PC7 | Vl | SEQ ID | SEQ ID NO. | SEQ ID | LSGRSDAGSPLGLAG | SEQ ID |
| | | NO. 24 | 13 | NO. 27 | (SEQ ID NO: 57) | NO: 69 |
| PC8 | Vl | SEQ ID | SEQ ID NO. | SEQ ID | LSGRSDAGSPLGLAG | SEQ ID |
| | | NO. 23 | 13 | NO. 27 | (SEQ ID NO: 57) | NO: 69 |
| PC13 | Vh | SEQ ID | SEQ ID NO. | SEQ ID | LSGRSDAGSPLGLAG | SEQ ID |
| | | NO. 24 | 13 | NO. 27 | (SEQ ID NO: 57) | NO: 73 |
| PC14 | Vh | SEQ ID | SEQ ID NO. | SEQ ID | LSGRSDAGSPLGLAG | SEQ ID |
| | | NO. 23 | 13 | NO. 27 | (SEQ ID NO: 57) | NO: 73 |
| PC15 | Vl | SEQ ID | SEQ ID NO. | SEQ ID | LSGRSDAGSPLGLAG | SEQ ID |
| | | NO. 24 | 13 | NO. 27 | (SEQ ID NO: 57) | NO: 73 |
| PC16 | Vl | SEQ ID | SEQ ID NO. | SEQ ID | LSGRSDAGSPLGLAG | SEQ ID |
| | | NO. 23 | 13 | NO. 27 | (SEQ ID NO: 57) | NO: 73 |

[0650] The polypeptide complex molecules of Table 7 were evaluated for their ability to bind TROP2 as well as CD3 in a standard enzyme linked immunosorbent assay (ELISA) format. Polypeptide complex binding kinetics of TROP2 or CD3 were measured before and after protease treatment. Briefly, biotinylated antigen was captured on neutravidin coated plates. Polypeptide complex molecules were treated with active matriptase (MTSP1) where indicated. Polypeptide complex molecules diluted in buffer were then added to the antigen coated plates. Bound polypeptide complex was detected using a standard horse radish peroxidase conjugate secondary antibody. The concentration of polypeptide complex required to achieve 50% maximal signal (EC50) was calculated.

[0651] FIGS. 2A and 2B show representative ELISAs of TROP2 binding. This data is summarized in Tables 8 and 9. The masked polypeptide complexes of PC13 and PC5 have EC50s about 400 fold higher than the unmasked polypeptide complex of PC1, protease treatment rescues the EC50s of PC13 and PC5 to only about 4 fold higher than the unmasked polypeptide complex. Similarly, the masked polypeptide complex of PC6 has an EC50 300 fold higher than PC1, and protease treatment rescues this to about 4.5 fold higher than PC1. The masked polypeptide complex of PC14 has an EC50 about 200 fold higher than PC1, and protease treatment rescues this to about 5 fold higher than PC1.

[0652] The polypeptide complexes with the flipped orientation show a similar pattern. PC7 and PC8 have EC50s greater than 100 fold and 60 fold higher than PC2 respectively. PC15 and PC16 have EC50s greater than 50 fold and 30 fold higher than PC2 respectively. Protease treatment rescued binding of all four complexes such that the EC50s were close to that of PC2.

TABLE 8
TROP2 binding

| | | | PC13 + | | PC5 + | | PC14 + | | PC6 + |
|---|---|---|---|---|---|---|---|---|---|
| TROP2 | PC1 | PC13 | MTSP1 | PC5 | MTSP1 | PC14 | MTSP1 | PC6 | MTSP1 |
| EC50 nM | 0.1477 | 58.42 | 0.5907 | 60.25 | 0.6337 | 30.88 | 0.7302 | 44.37 | 0.6686 |
| Fold | 1× | 395.5× | 4× | 407.9× | 4.3× | 209.1× | 4.9× | 300.4× | 4.5× |
| shift | | | | | | | | | |

TABLE 9
TROP2 binding

| | | | PC15 + | | PC7 + | | PC16 + | | PC 8 + |
|---|---|---|---|---|---|---|---|---|---|
| TROP2 | PC2 | PC15 | MTSP1 | PC7 | MTSP1 | PC16 | MTSP1 | PC8 | MTSP1 |
| EC50 nM | 0.3697 | 19.39 | 0.5306 | 39.38 | 0.4087 | 11.98 | 0.4572 | 23.25 | 0.3289 |
| Fold | 1× | 52.4× | 1.4× | 106.5× | 1.1× | 32.4× | 1.2× | 62.9× | 0.9× |
| shift | | | | | | | | | |

[0653] FIGS. 3A and 3B show representative ELISAs of CD3 binding. This data is summarized in Tables 10 and 11. The masked polypeptide complexes of PC13 and PC14 respectively had an EC50s about 1313 and 1723 fold higher than the unmasked polypeptide complex of PC1, protease treatment rescued the EC50s to under 2 fold higher than the unmasked polypeptide complex. Similarly, the masked polypeptide complexes of PC5 and PC6 respectively had EC50s about 321 and 267 fold higher than PC1, and protease treatment rescued the EC50s of both to about 1.5 fold higher than PC1. The polypeptide complexes with the flipped orientation show a similar pattern. PC15 and PC16 had EC50s 390 fold and 442 fold higher than PC2 respectively. PC7 and PC8 have EC50s 138 fold and 165 fold higher than PC2 respectively. Protease treatment rescued the EC50s of all four complexes such that the EC50s are close to that of PC2.

TABLE 10
CD3 binding

| | | | PC13 + | | PC5 + | | PC14 + | | PC6 + |
|---|---|---|---|---|---|---|---|---|---|
| CD3e | PC1 | PC13 | MTSP1 | PC5 | MTSP1 | PC14 | MTSP1 | PC6 | MTSP1 |
| EC50 nM | 0.05402 | 70.96 | 0.07024 | 17.34 | 0.07634 | 93.10 | 0.09582 | 14.46 | 0.07916 |
| Fold | 1× | 1313.6× | 1.3× | 321× | 1.4× | 1723.4× | 1.8× | 267.7× | 1.5× |
| shift | | | | | | | | | |

TABLE 11
CD3 binding

| | | | PC15 + | | PC7 + | | PC16 + | | PC8 + |
|---|---|---|---|---|---|---|---|---|---|
| CD3e | PC2 | PC15 | MTSP1 | PC7 | MTSP1 | PC16 | MTSP1 | PC8 | MTSP1 |
| EC50 nM | 0.08100 | 31.62 | 0.09884 | 11.21 | 0.07748 | 35.79 | 0.07767 | 15.02 | 0.06267 |
| Fold | 1× | 390.4× | 1.2× | 138.4× | 1× | 441.9× | 1× | 185.4× | 0.8× |
| shift | | | | | | | | | |

### Example 2: Polypeptide Complex Mediated Tumor Cytotoxicity and T Cell Activation

[0654] Polypeptide complexes were evaluated in a functional in vitro tumor cell killing assay using the TROP2 positive tumor cell lines HCT116 and MDAMB231. Tumor cell killing was measured using a real time cell analyzer from Acea Biosciences that relies on sensor impedance measurements (cell index) that increased as tumor cells adhere, spread, and expand on the surface of the sensor. Likewise, as the tumor cells were killed the impedance decreased. 25,000 tumor cells were added per well and allowed to adhere overnight. The following day polypeptide complexes titrated in human serum supplemented medium along with 75,000 CD8+ T cells were added to the wells. Cell index measurements were taken every 10 minutes for an additional 96 hours. The cell index times number of hours (tumor cell growth kinetics) was then plotted versus concentration of polypeptide complex where the concentration required to reduce the tumor growth 50% (IC50) was calculated using Graphpad Prism.

[0655] The HCT116 tumor cell line has a TROP2 density of <10,000 copies per cell. FIGS. 4A and 4B show representative viability data for HCT116. This data is summarized in Tables 12 and 13. The masked polypeptide complex of PC5 has an IC50 greater than 6000 fold higher than the unmasked polypeptide complex of PC1, protease treatment rescues the IC50 to only about 3 fold higher than the unmasked polypeptide complex. Similarly, the masked polypeptide complex of PC6 has an IC50 about 5750 fold higher than PC1, and protease treatment rescues this to about 8.6 fold higher than PC1. The polypeptide complexes with the flipped orientation show a similar pattern. PC7 and PC8 have IC50s 4567 fold and 1707 fold higher than PC2 respectively. Protease treatment rescues both of these complexes such that the IC50s are less than 3 fold that of PC2.

TABLE 12
HCT116 cell assay

| HCT116 | | | PC13 + | | PC5 + | | PC14 + | | PC6 + |
|---|---|---|---|---|---|---|---|---|---|
| 72 hr | PC1 | PC13 | MTSP1 | PC5 | MTSP1 | PC14 | MTSP1 | PC6 | MTSP1 |
| IC50 pM | 8.604 | 98.305 | 45.06 | 56.038 | 25.69 | 58.112 | 34.62 | 49.533 | 74.25 |
| Fold | 1× | 11,425.5× | 5.2× | 6.513× | 3× | 6.754.1× | 4× | 5.757× | 8.6× |
| shift | | | | | | | | | |

TABLE 13
HCT116 cell assay

| HCT116 | | | PC15 + | | PC7 + | | PC16 + | | PC8 + |
|---|---|---|---|---|---|---|---|---|---|
| 72 hr | PC2 | PC15 | MTSP1 | PC7 | MTSP1 | PC16 | MTSP1 | PC8 | MTSP1 |
| IC50 pM | 1.523 | 3.253 | 2.46 | 6.955 | 4.488 | 1.715 | 2.34 | 2.601 | 3.676 |
| Fold | 1× | 2,135.9× | 1.6× | 4,566.6× | 2.9× | 1,126.1× | 1.5× | 1,707.8× | 2.4× |
| shift | | | | | | | | | |

[0656] The MDAMB231 tumor cell line has a TROP2 density of about 32,000 copies per cell. FIGS. 4C and 4D show representative viability data for MDAMB231. This data is summarized in Table 14. The masked polypeptide complex of PC5 has an IC50 greater than 12000 fold higher than the unmasked polypeptide complex of PC1, protease treatment rescues the IC50 to less than 2 fold higher than the unmasked polypeptide complex. The masked polypeptide complex of PC6 has an IC50 about 24,000 fold higher than PC1. The polypeptide complexes with the flipped orientation show a similar pattern. PC7 has an IC50 6864 fold higher than PC2.

TABLE 14
MDAMB231 cell assay

| MDAMB231 | | | PC5 + | | | |
|---|---|---|---|---|---|---|
| 72 hr | PC1 | PC5 | MTSP1 | PC6 | PC7 | PC2 |
| IC50 pM | 1.514 | 18.951 | 2.868 | 36.549 | 1.817 | 0.2647 |
| Fold shift | 1× | 12.517× | 1.9× | 24.141× | 6.864× | 1× |

[0657] Some further polypeptide complexes with different Cd3 masking sequences are shown in Table 14. The TROP2-CD3 polypeptide complexes of Table 15 were evaluated for TROP2 and CD3ε binding as described above.

TABLE 15
Polypeptide complexes

| Polypeptide | | | | | |
|---|---|---|---|---|---|
| complex | Fab Mask | CD3 | CD3 Mask | Cleavable linker | sdA |
| PC1 | Non masked TCE, SEQ ID NO. 13 (normal orientation) | | | | |
| PC9 | SEQ ID NO. | SEQ ID NO. | SEQ ID NO. | LSGRSDAGSPLGLAG | SEQ ID |
| | 24 | 13 | 26 | (SEQ ID NO: 57) | NO: 69 |
| PC11 | SEQ ID NO. | SEQ ID NO. | SEQ ID NO. | LSGRSDAGSPLGLAG | SEQ ID |
| | 23 | 13 | 26 | (SEQ ID NO: 57) | NO: 69 |
| PC2 | Non masked TCE, SEQ ID NO. 13 (flipped orientation) | | | | |
| PC10 | SEQ ID NO. | SEQ ID NO. | SEQ ID NO. | LSGRSDAGSPLGLAG | SEQ ID |
| | 24 | 13 | 26 | (SEQ ID NO: 57) | NO: 69 |
| PC12 | SEQ ID | SEQ ID | SEQ ID | LSGRSDAGSPLGLAG | SEQ ID |
| | NO. 23 | NO. 13 | NO. 26 | (SEQ ID NO: 57) | NO: 69 |

[0658] FIGS. 5A and 5B show representative ELISAs of TROP2 binding. This data is summarized in Tables 16 and 17. The masked polypeptide complex of PC9 has an EC50 greater than 450 fold higher than the unmasked polypeptide complex of PC1, protease treatment rescues the EC50 to only about 3.3 fold higher than the unmasked polypeptide complex. Similarly, the masked polypeptide complex of PC11 has an EC50 greater than 200 fold higher than PC1, and protease treatment rescues this to about 8 fold higher than PC1. The polypeptide complexes with the flipped orientation show a similar pattern. PC10 and PC12 have EC50s about 128 fold and 37 fold higher than PC2 respectively. Protease treatment rescues both of these complexes such that the EC50s are about twice that of PC2.

TABLE 16
TROP2 binding

| | | | PC9 + | | PC11 + |
|---|---|---|---|---|---|
| TROP2 | PC1 | PC9 | MTSP1 | PC11 | MTSP1 |
| EC50 | 0.1344 | 62.57 | 0.4432 | 28.90 | 1.023 |
| nM | | | | | |
| Fold | 1x | 465.6x | 3.3x | 215x | 7.6x |
| shift | | | | | |

TABLE 17
TROP2 binding

| | | | PC10 + | | PC12 + |
|---|---|---|---|---|---|
| TROP2 | PC2 | PC10 | MTSP1 | PC12 | MTSP1 |
| EC50 | 0.2833 | 36.46 | 0.5404 | 10.37 | 0.6020 |
| nM | | | | | |
| Fold | 1x | 128.7x | 1.9x | 36.6x | 2.1x |
| shift | | | | | |

[0659] FIGS. 6A and 6B show representative ELISAs of CD3e binding. This data is summarized in Tables 18 and 19. The masked polypeptide complex of PC9 has an EC50 greater than 78 fold higher than the unmasked polypeptide complex of PC1, protease treatment rescues the EC50 to only about the same as the unmasked polypeptide complex. Similarly, the masked polypeptide complex of PC11 has an EC50 about 70 fold higher than PC1, and protease treatment rescues this to about 2.5 fold higher than PC1. The polypeptide complexes with the flipped orientation show a similar pattern. PC10 and PC12 have EC50s about 85 fold and 50 fold higher than PC2 respectively. Protease treatment rescues both of these complexes such that the EC50s are about twice that of PC2.

TABLE 18
CD3 binding

| | | | PC9 + | | PC11 + |
|---|---|---|---|---|---|
| CD3e | PC1 | PC9 | MTSP1 | PC11 | MTSP1 |
| EC50 nM | 0.05085 | 3.976 | 0.05538 | 3.526 | 0.1286 |
| Fold shift | 1x | 78.2x | 1.1x | 69.3x | 2.5x |

TABLE 19
CD3 binding

| | | | PC10 + | | PC12 + |
|---|---|---|---|---|---|
| CD3e | PC2 | PC10 | MTSP1 | PC12 | MTSP1 |
| EC50 nM | 0.05690 | 4.829 | 0.1019 | 2.819 | 0.09992 |
| Fold shift | 1x | 84.9x | 1.8x | 49.5x | 1.8x |

[0660] The polypeptide complexes of Table 14 were also evaluated in a functional in vitro tumor cell killing assay using HCT116 as described above. The HCT116 tumor cell line has a TROP2 density of <10,000 copies per cell. FIGS. 7A and 7B show representative viability data for HCT116. This data is summarized in Table 20. The masked polypeptide complexes of PC9 and PC11 had IC50s respectively about 1259 and 488 fold higher than the unmasked polypeptide complex of PC1, protease treatment rescues the IC50s to about 2.5 and 5 fold higher than the unmasked polypeptide complex. The masked polypeptide complexes of PC10 and PC12 had IC50s respectively about 2337 and 935 fold higher than the unmasked polypeptide complex of PC2, protease treatment rescues the IC50s to about 2 and 3 fold higher than the unmasked polypeptide complex.

TABLE 20
HCT116 cell assay

| HCT116 | | | PC9 + | | PC11 + | | | PC10 + | | PC12 + |
|---|---|---|---|---|---|---|---|---|---|---|
| 72 hr | PC1 | PC9 | MTSP1 | PC11 | MTSP1 | PC2 | PC10 | MTSP1 | PC12 | MTSP1 |
| IC50 pM | 12.34 | 15.533 | 30.21 | 6.022 | 60.18 | 1.119 | 2.615 | 2.101 | 935.2 | 3.36 |
| Fold shift | 1× | 1.259× | 2.45× | 488.0× | 4.88× | 1 | 2.337× | 1.88× | 835.7× | 3.0× |

### Example 3: Polypeptide Complex Mediated Tumor Cell Killing

[0661] Polypeptide complexes were evaluated in a functional in vitro tumor cell killing assay using the TROP2 positive tumor cell lines HCT116, NCI-H292, and MDAMB231. Tumor cell killing was measured using an xCelligence real time cell analyzer from Agilent that relies on sensor impedance measurements (cell index) that increased as tumor cells adhere, spread, and expand on the surface of the sensor. Likewise, as the tumor cells were killed the impedance decreased. 10,000 tumor cells were added per well and allowed to adhere overnight on a 96 well E-Plate. The following day polypeptide complexes titrated in human serum supplemented medium along with 30,000 CD8+ T cells were added to the wells. Cell index measurements were taken every 10 minutes for an additional 72 hours. The cell index times number of hours (tumor cell growth kinetics) was then plotted versus concentration of polypeptide complex where the concentration required to reduce the tumor growth 50% (IC50) was calculated using Graphpad Prism software. Data for NCI-H292 (H292) is seen in FIGS. 8A-8C. Data for HCT116 is seen in FIGS. 9A-9D. Data for MDMAB231 is seen in FIGS. 10A-10C.

### Example 4: Polypeptide Complex Pharmacokinetics in Cynomolgus Monkey

[0662] Pharmacokinetics and exploratory safety of polypeptide molecules were evaluated in cynomolgus monkeys. Briefly, cynomolgus monkeys of approximately 3 kg bodyweight were administered polypeptides as an IV bolus and observed daily for signs of adverse events. No in-life adverse events were observed. After dosing, blood was collected in K2 EDTA tubes at specific timepoints and processed to plasma. Plasma was stored frozen until analysis. Concentration of polypeptide molecules in plasma was measured via standard ELISA techniques relative to a reference standard diluted in control cyno plasma. Plasma concentration curves were fit to a standard two phase exponential equation representing distribution and elimination phases. Fitting of pharmacokinetics enabled the calculation of Cmax, half-life, volume of distribution, clearance, and 7 day area under the curve (AUC) shown in Table 21 for TROP2 TCE polypeptide complexes and Tables 22-24 for TROP2 TRACTr polypeptide complexes and FIGS. 11A-11D.

TABLE 21

| | PC1 3 ug/kg | Units |
|---|---|---|
| C_{MAX} | 0.40 | nM |
| t_{1/2} | 1.02 | hr |
| Vd | 0.30 | L |
| VSS | 0.30 | L |
| CL | 67.31 | mL/hr/kg |
| BW | 3.00 | kg |
| 7 day | 49 | nM · min |
| AUC | | |

TABLE 22

| | PC5 100 ug/kg | Units |
|---|---|---|
| C_{MAX} | 34.32 | nM |
| t_{1/2} | 90.16 | hr |
| Vd | 0.09 | L |
| VSS | 0.19 | L |
| CL | 0.23 | mL/hr/kg |
| BW | 3.00 | kg |
| 7 day | 142,182 | nM · min |
| AUC | | |

TABLE 23

| | PC18 100 ug/kg | Units |
|---|---|---|
| C_{MAX} | 37.94 | nM |
| t_{1/2} | 97.31 | hr |
| Vd | 0.08 | L |
| VSS | 0.33 | L |
| CL | 0.19 | mL/hr/kg |
| BW | 3.00 | kg |
| 7 day | 127,094 | nM · min |
| AUC | | |

TABLE 24

| | PC21 100 ug/kg | Units |
|---|---|---|
| C_{MAX} | 42.12 | nM |
| t_{1/2} | 100.73 | hr |
| Vd | 0.07 | L |
| VSS | 0.39 | L |
| CL | 0.17 | mL/hr/kg |
| BW | 3.00 | kg |
| 7 day | 137,581 | nM · min |
| AUC | | |

### Example 5: Polypeptide Complexes in Cynomolgus Cytokine Release

[0663] Cytokine release after polypeptide molecule administration by IV bolus was evaluated in cynomolgus monkeys. Briefly, cynomolgus monkeys of approximately 3 kg bodyweight were administered polypeptides as an IV bolus and observed daily for signs of adverse events. No in-life adverse events were observed. After dosing, blood was collected in K2 EDTA tubes at specific timepoints and processed to plasma. Plasma was stored frozen until analysis. Plasma samples were analyzed for cytokines using a non-human primate cytometric Th1/Th2 bead array kit from BD biosciences following the manufacturer's instructions. Interferon gamma, tumor necrosis factor alpha, interleukin 6, interleukin 5, interleukin 4, and interleukin 2 levels in plasma were calculated relative to reference standards provided with the bead array kit. Data is seen in FIGS. 12A-12D.

### Example 6: Polypeptide Complexes in Cynomolgus Toxicity

[0664] Systemic liver enzymes after polypeptide molecule administration by IV bolus was evaluated in cynomolgus monkeys. Briefly, cynomolgus monkeys of approximately 3 kg bodyweight were administered polypeptides as an IV bolus and observed daily for signs of adverse events. No in-life adverse events were observed. After dosing, blood was collected in K2 EDTA tubes at specific timepoints and processed to plasma. Plasma was stored frozen until analysis. Plasma samples were analyzed for the presence of liver enzymes aspartate transaminase (AST) and alanine aminotransferase (ALT) as signs of potential liver toxicity. AST and ALT levels were remained within the normal ranges for all timepoints tested after dosing suggesting a lack of liver toxicity. AST and ALT were quantified following the instructions provided in a commercially available kit from Millipore. AST and ALT levels were calculated according to manufacturer's instructions relative to a positive control reference standard. Data is seen in FIGS. 13A-13D.

### Example 7: Optimized Phage Library Construction—TROP2 Fab Peptides

[0665] Sequence activity relationships were established for TROP2 Fab Peptide-1 and TROP2 Fab Peptide-2 by mutating each individual residue within the peptide to alanine and measuring binding and inhibition against TROP2 Fab. Peptide residues whose alanine mutations significantly weakened binding and inhibition were considered key residues where mutations were not tolerated. Peptide residues whose alanine mutations performed similarly to the non-mutated sequence were considered non-critical sites where mutations were indeed tolerated. Using the peptide sequence activity relationships (SAR), DNA oligo libraries were constructed where codons encoding critical residues within each peptide sequence were minimally mutated and codons encoding non-critical residues were heavily mutated. The resulting oligos were cloned into bacteriophage vectors used to display the SAR guided peptides via fusion to the pIII filament of the bacteriophage. The relevant vectors were then used to produce the phage optimization libraries via amplification in bacteria using standard techniques in the field. FIG. 14A and FIG. 14B demonstrate TROP2 Fab inhibition of alanine scanning peptides of TROP2 Fab Peptide-1, the sequences of which are shown in Table 25. FIG. 15A and FIG. 15B demonstrate TROP2 Fab binding of alanine scanning peptides of TROP2 Fab Peptide-2. FIG. 16A and FIG. 16B demonstrate TROP2 Fab inhibition of alanine scanning peptides of TROP2 Fab Peptide-2, the sequences of which are shown in Table 26.

TABLE 25
TROP2 Fab Peptide-1 Ala Scan Peptide Sequences

| TROP2 Fab | | |
|---|---|---|
| Peptide-1 Ala | | |
| Scan Peptide | Amino acid sequence | SEQ ID NO: |
| Peptide-4 | AVLFCVKNLYCWVT | 133 |
| Peptide-5 | SALFCVKNLYCWVT | 134 |
| Peptide-6 | SVAFCVKNLYCWVT | 135 |
| Peptide-7 | SVLACVKNLYCWVT | 136 |
| Peptide-8 | SVLFCAKNLYCWVT | 137 |
| Peptide-9 | SVLFCVANLYCWVT | 138 |
| Peptide-10 | SVLFCVKALYCWVT | 139 |
| Peptide-11 | SVLFCVKNAYCWVT | 140 |
| Peptide-12 | SVLFCVKNLACWVT | 141 |
| Peptide-13 | SVLFCVKNLYCAVT | 142 |
| Peptide-14 | SVLFCVKNLYCWAT | 143 |
| Peptide-15 | SVLFCVKNLYCWVA | 144 |
| Peptide-16 | SVLFCVKNLYCWVT | 145 |

TABLE 26
TROP2 Fab Peptide-2 Ala Scan Peptide Sequences

| TROP2 Fab | | |
|---|---|---|
| Peptide-2 Ala | | |
| Scan Peptide | Amino Acid Sequence | SEQ ID NO: |
| Peptide-17 | ADFCKIYSWPVCHQ | 146 |
| Peptide-18 | VAFCKIYSWPVCHQ | 147 |
| Peptide-19 | VDACKIYSWPVCHQ | 148 |
| Peptide-20 | VDFCAIYSWPVCHQ | 149 |
| Peptide-21 | VDFCKAYSWPVCHQ | 150 |
| Peptide-22 | VDFCKIASWPVCHQ | 151 |
| Peptide-23 | VDFCKIYAWPVCHQ | 152 |
| Peptide-24 | VDFCKIYSAPVCHQ | 153 |
| Peptide-25 | VDFCKIYSWAVCHQ | 154 |
| Peptide-26 | VDFCKIYSWPACHQ | 155 |
| Peptide-27 | VDFCKIYSWPVCAQ | 156 |
| Peptide-28 | VDFCKIYSWPVCHA | 157 |
| Peptide-29 | VDFCKIYSWPVCHQ | 158 |

### Example 8: Panning of the Optimized Phage Library—TROP2 Fab Peptides

[0666] Once the phage optimization libraries were completed, phage libraries were bio-panned using TROP2 Fab loaded beads. Multiple rounds of panning were performed where bacteriophage was allowed to bind to TROP2 Fab loaded beads, washed, eluted, and amplified. Additional selective pressure was included during each round of panning using a fixed concentration of TROP2 soluble protein, TROP2 Fab Peptide-1, or TROP2 Fab Peptide-2. After panning, phage infected bacteria were plated out and colonies picked into 96 well blocks. Clonal phage was then amplified and separated from bacterial cells via centrifugation. Phage containing supernatants were tested in binding ELISAs against TROP2 Fab coated plates in the presence or absence of saturating concentration of TROP2 soluble protein. Phage able to bind TROP2 Fab were selected for sequence analysis if the binding signal was reduced in the presence of TROP2 soluble protein.

### Example 9: Panning ELISAs—TROP2 Fab Peptides

[0667] Clonal phage were harvested as crude supernatants and screened via standard enzyme linked immunosorbent assays (ELISAs). Briefly, biotinylated TROP2 Fab was captured on neutravidin coated plates. Prior to the addition of clonal phage, wells were incubated with blocking buffer and TROP2 soluble protein or blocking buffer alone. Without washing or aspirating, clonal phage supernatants were then added to the wells and incubated for a short time. Wells were then washed followed by detection of bound phage using a horse radish peroxidase conjugated anti-M13 antibody. Clonal phage of interest were then sent for sequence analysis.

[0668] Phage panning results of TROP2 Fab Peptide-1 library sequences are shown in Table 27. 979 clonal phage sequences were identified. 20 of 979 clonal phage were selected for peptide synthesis and evaluated for peptide inhibition of TROP2 Fab. The sequences of those peptides selected for synthesis are shown in Table 28, and further evaluated for inhibition of TROP2 Fab as shown in FIGS. 17A through 17C. The consensus sequence calculated from all the sequences of Table 27 is shown in FIG. 18 and was generated using WebLogo 3.7.4.

[0669] Phage panning results of TROP2 Fab Peptide-2 library sequences are shown in Table 29. 596 clonal phage sequences were identified. 23 of 596 were selected for peptide synthesis and evaluated for peptide binding to TROP2 Fab (FIGS. 19A-19C), and peptide inhibition of TROP2 Fab (FIGS. 20A-20C). The sequences of those peptides selected for synthesis are shown in Table 30. The consensus sequence calculated from all the sequences of Table 29 is shown in FIG. 21 and was generated using WebLogo 3.7.4.

TABLE 27
Phage panning results of TROP2 Fab Peptide-1 library sequences. (—) indicates same amino
acid as in TROP2 Fab Peptide-1 corresponding position (e.g. Phage-1 position).

| | Amino acid position sequence | | | | | | | | | | | | | |
|---|---|---|---|---|---|---|---|---|---|---|---|---|---|---|
| 2 | 1 | 2 | 3 | 4 | 5 | 6 | 7 | 8 | 9 | 10 | 11 | 12 | 13 | 14 |
| Phage-1 | S | V | L | F | C | V | K | N | L | Y | C | W | V | T |
| Phage-2 | D | D | — | I | — | — | — | — | — | F | — | — | T | S |
| Phage-3 | D | N | — | I | — | — | — | — | — | W | — | — | I | A |
| Phage-4 | D | T | — | — | — | — | — | — | — | — | — | — | I | V |
| Phage-5 | D | T | — | S | — | F | R | — | — | — | — | — | I | — |
| Phage-6 | D | T | — | W | — | — | — | — | — | — | — | — | — | A |
| Phage-7 | D | — | — | — | — | — | R | — | — | — | — | — | T | S |
| Phage-8 | F | D | — | L | — | — | R | — | — | — | — | — | N | V |
| Phage-9 | F | S | — | V | — | — | R | — | — | — | — | — | N | V |
| Phage- | F | T | — | — | — | — | Q | — | — | — | — | — | N | V |
| 10 | | | | | | | | | | | | | | |
| Phage- | H | D | — | Q | — | F | Q | — | — | F | — | — | I | V |
| 11 | | | | | | | | | | | | | | |
| Phage- | L | S | — | — | — | — | — | — | — | — | — | — | N | V |
| 12 | | | | | | | | | | | | | | |
| Phage- | N | Y | — | L | — | — | — | — | — | — | — | — | I | V |
| 13 | | | | | | | | | | | | | | |
| Phage- | — | T | — | E | — | — | R | — | — | — | — | — | I | S |
| 14 | | | | | | | | | | | | | | |
| Phage- | — | T | — | — | — | — | — | — | — | — | — | — | — | A |
| 15 | | | | | | | | | | | | | | |
| Phage- | — | T | — | — | — | — | R | — | — | — | — | — | T | V |
| 16 | | | | | | | | | | | | | | |
| Phage- | — | Y | — | V | — | — | — | — | V | — | — | — | T | A |
| 17 | | | | | | | | | | | | | | |
| Phage- | T | A | — | — | — | F | — | — | V | — | — | — | N | V |
| 18 | | | | | | | | | | | | | | |
| Phage- | T | S | — | I | — | F | R | — | V | — | — | — | N | V |
| 19 | | | | | | | | | | | | | | |
| Phage- | Y | D | — | V | — | L | R | — | — | F | — | — | T | A |
| 20 | | | | | | | | | | | | | | |
| Phage- | Y | S | — | V | — | — | — | — | — | — | — | — | N | L |
| 21 | | | | | | | | | | | | | | |
| Phage- | A | T | — | — | — | — | R | — | — | — | — | — | T | A |
| 22 | | | | | | | | | | | | | | |
| Phage- | F | S | — | L | — | — | R | — | — | — | — | — | N | V |
| 23 | | | | | | | | | | | | | | |
| Phage- | N | A | — | V | — | — | R | — | — | — | — | — | I | Y |
| 24 | | | | | | | | | | | | | | |
| Phage- | T | S | — | W | — | — | R | — | — | — | — | Y | N | V |
| 25 | | | | | | | | | | | | | | |
| Phage- | Y | T | — | Y | — | — | Q | — | V | — | — | — | T | L |
| 26 | | | | | | | | | | | | | | |
| Phage- | D | T | — | — | — | — | — | — | — | — | — | — | I | N |
| 27 | | | | | | | | | | | | | | |
| Phage- | Y | S | — | V | — | — | N | — | — | — | — | — | N | — |
| 28 | | | | | | | | | | | | | | |
| Phage- | T | D | — | V | — | — | M | — | R | W | — | — | H | Y |
| 29 | | | | | | | | | | | | | | |
| Phage- | N | T | — | — | — | — | Q | — | — | — | — | — | I | H |
| 30 | | | | | | | | | | | | | | |
| Phage- | N | T | — | — | — | — | R | — | — | — | — | — | I | N |
| 31 | | | | | | | | | | | | | | |
| Phage- | T | D | — | L | — | F | Q | — | I | — | — | — | H | — |
| 32 | | | | | | | | | | | | | | |
| Phage- | N | S | — | — | — | L | H | — | — | V | — | — | I | D |
| 33 | | | | | | | | | | | | | | |
| Phage- | N | T | — | V | — | — | Q | — | V | — | — | — | I | N |
| 34 | | | | | | | | | | | | | | |
| Phage- | N | S | — | — | — | F | Q | — | — | L | — | — | T | D |
| 35 | | | | | | | | | | | | | | |
| Phage- | N | H | — | I | — | — | — | — | — | W | — | — | I | N |
| 36 | | | | | | | | | | | | | | |
| Phage- | — | D | — | — | — | L | — | — | I | — | — | — | H | V |
| 37 | | | | | | | | | | | | | | |
| Phage- | N | I | — | V | — | — | N | — | I | — | — | — | I | D |
| 38 | | | | | | | | | | | | | | |
| Phage- | N | T | — | W | — | — | — | — | — | — | — | — | I | D |
| 39 | | | | | | | | | | | | | | |
| Phage- | D | T | — | — | — | — | — | — | — | F | — | — | T | H |
| 40 | | | | | | | | | | | | | | |
| Phage- | A | T | — | — | — | F | Q | — | — | — | — | — | N | I |
| 41 | | | | | | | | | | | | | | |
| Phage- | Y | A | — | — | — | — | N | — | I | — | — | — | I | S |
| 42 | | | | | | | | | | | | | | |
| Phage- | — | D | — | — | — | — | R | — | — | — | — | — | N | S |
| 43 | | | | | | | | | | | | | | |
| Phage- | D | — | — | I | — | — | — | — | — | — | — | — | I | H |
| 44 | | | | | | | | | | | | | | |
| Phage- | N | T | — | L | — | F | R | — | — | — | — | — | — | D |
| 45 | | | | | | | | | | | | | | |
| Phage- | — | H | — | M | — | — | R | — | — | — | — | — | I | S |
| 46 | | | | | | | | | | | | | | |
| Phage- | D | H | — | V | — | — | — | — | — | — | — | — | I | D |
| 47 | | | | | | | | | | | | | | |
| Phage- | N | S | — | — | — | — | — | — | — | — | — | — | — | D |
| 48 | | | | | | | | | | | | | | |
| Phage- | A | S | — | — | — | — | Q | — | — | W | — | — | T | S |
| 49 | | | | | | | | | | | | | | |
| Phage- | A | S | — | — | — | F | Q | — | — | — | — | — | N | Y |
| 50 | | | | | | | | | | | | | | |
| Phage- | L | S | — | — | — | — | H | — | I | — | — | — | T | D |
| 51 | | | | | | | | | | | | | | |
| Phage- | T | T | — | Y | — | F | Q | — | — | — | — | — | S | V |
| 52 | | | | | | | | | | | | | | |
| Phage- | P | A | — | V | — | — | R | — | — | — | — | — | I | V |
| 53 | | | | | | | | | | | | | | |
| Phage- | N | S | — | — | — | — | Q | — | — | — | — | — | I | I |
| 54 | | | | | | | | | | | | | | |
| Phage- | A | S | — | L | — | — | — | — | — | — | — | — | I | D |
| 55 | | | | | | | | | | | | | | |
| Phage- | N | S | — | — | — | L | — | — | — | — | — | — | I | D |
| 56 | | | | | | | | | | | | | | |
| Phage- | N | S | — | L | — | — | — | — | — | W | — | — | I | D |
| 57 | | | | | | | | | | | | | | |
| Phage- | — | D | — | — | — | W | R | — | — | F | — | — | H | I |
| 58 | | | | | | | | | | | | | | |
| Phage- | N | N | — | V | — | | — | — | — | W | — | — | — | D |
| 59 | | | | | | | | | | | | | | |
| Phage- | Y | H | — | M | — | — | R | — | — | — | — | — | — | V |
| 60 | | | | | | | | | | | | | | |
| Phage- | — | S | — | V | — | — | R | — | — | — | — | — | I | D |
| 61 | | | | | | | | | | | | | | |
| Phage- | T | T | — | L | — | — | — | — | — | — | — | — | H | S |
| 62 | | | | | | | | | | | | | | |
| Phage- | T | S | — | — | — | F | Q | — | V | — | — | — | I | D |
| 63 | | | | | | | | | | | | | | |
| Phage- | T | S | — | I | — | — | R | — | I | L | — | — | H | S |
| 64 | | | | | | | | | | | | | | |
| Phage- | D | — | — | L | — | F | R | — | — | W | — | — | H | — |
| 65 | | | | | | | | | | | | | | |
| Phage- | T | D | — | I | — | — | M | — | — | — | — | — | H | — |
| 66 | | | | | | | | | | | | | | |
| Phage- | L | D | — | I | — | — | R | — | — | — | — | — | I | N |
| 67 | | | | | | | | | | | | | | |
| Phage- | N | Y | — | V | — | E | — | — | — | — | — | R | I | D |
| 68 | | | | | | | | | | | | | | |
| Phage- | N | T | — | I | — | — | R | — | — | — | — | — | — | I |
| 69 | | | | | | | | | | | | | | |
| Phage- | N | A | — | L | — | W | Q | — | I | — | — | — | I | D |
| 70 | | | | | | | | | | | | | | |
| Phage- | N | T | — | L | — | — | N | — | — | W | — | — | I | D |
| 71 | | | | | | | | | | | | | | |
| Phage- | L | S | — | — | — | — | — | — | — | — | — | — | N | A |
| 72 | | | | | | | | | | | | | | |
| Phage- | N | N | — | Y | — | F | Q | — | — | — | — | — | I | D |
| 73 | | | | | | | | | | | | | | |
| Phage- | L | A | — | — | — | — | — | — | I | — | — | — | T | S |
| 74 | | | | | | | | | | | | | | |
| Phage- | T | H | — | V | — | — | Y | — | V | — | — | — | H | A |
| 75 | | | | | | | | | | | | | | |
| Phage- | N | T | — | I | — | L | N | — | — | W | — | — | I | D |
| 76 | | | | | | | | | | | | | | |
| Phage- | N | N | — | L | — | — | R | — | — | — | — | — | I | D |
| 77 | | | | | | | | | | | | | | |
| Phage- | N | T | — | V | — | — | N | — | — | F | — | — | I | N |
| 78 | | | | | | | | | | | | | | |
| Phage- | T | S | — | M | — | — | — | — | — | F | — | — | H | — |
| 79 | | | | | | | | | | | | | | |
| Phage- | — | S | F | S | — | W | H | — | — | — | — | — | D | V |
| 80 | | | | | | | | | | | | | | |
| Phage- | D | A | — | — | — | — | R | — | — | — | — | — | I | D |
| 81 | | | | | | | | | | | | | | |
| Phage- | V | D | — | V | — | I | R | — | — | — | — | — | N | D |
| 82 | | | | | | | | | | | | | | |
| Phage- | — | T | — | — | — | — | — | — | — | — | — | — | T | N |
| 83 | | | | | | | | | | | | | | |
| Phage- | A | N | — | V | — | — | Q | — | — | — | — | — | I | — |
| 84 | | | | | | | | | | | | | | |
| Phage- | A | A | — | — | — | — | — | — | — | — | — | — | I | D |
| 85 | | | | | | | | | | | | | | |
| Phage- | — | S | — | — | — | — | — | — | — | — | — | — | — | D |
| 86 | | | | | | | | | | | | | | |
| Phage- | H | D | — | V | — | F | — | — | — | W | — | — | N | D |
| 87 | | | | | | | | | | | | | | |
| Phage- | N | H | — | L | — | L | N | — | — | — | — | — | I | D |
| 88 | | | | | | | | | | | | | | |
| Phage- | Y | D | — | V | — | — | R | — | — | — | — | — | H | D |
| 89 | | | | | | | | | | | | | | |
| Phage- | — | S | — | V | — | — | N | — | — | — | — | — | N | — |
| 90 | | | | | | | | | | | | | | |
| Phage- | — | D | — | — | — | — | M | — | — | — | — | — | H | Y |
| 91 | | | | | | | | | | | | | | |
| Phage- | D | S | — | L | — | F | Q | — | — | W | — | — | I | V |
| 92 | | | | | | | | | | | | | | |
| Phage- | N | H | — | L | — | — | R | — | — | — | — | — | — | — |
| 93 | | | | | | | | | | | | | | |
| Phage- | A | D | — | — | — | — | — | — | — | W | — | — | H | S |
| 94 | | | | | | | | | | | | | | |
| Phage- | N | A | — | — | — | F | N | — | — | — | — | — | I | D |
| 95 | | | | | | | | | | | | | | |
| Phage- | N | S | — | — | — | — | Q | — | V | — | — | — | N | — |
| 96 | | | | | | | | | | | | | | |
| Phage- | T | N | — | M | — | — | R | — | — | — | — | — | N | D |
| 97 | | | | | | | | | | | | | | |
| Phage- | I | H | — | I | — | — | E | — | I | — | — | — | H | V |
| 98 | | | | | | | | | | | | | | |
| Phage- | A | D | — | L | — | — | R | — | — | — | — | — | H | D |
| 99 | | | | | | | | | | | | | | |
| Phage- | H | S | — | — | — | — | — | — | — | — | — | — | H | — |
| 100 | | | | | | | | | | | | | | |
| Phage- | — | — | — | — | — | — | R | — | — | — | — | — | T | D |
| 101 | | | | | | | | | | | | | | |
| Phage- | T | N | — | — | — | — | R | — | — | — | — | — | T | D |
| 102 | | | | | | | | | | | | | | |
| Phage- | — | T | — | Y | — | — | — | — | — | — | — | — | T | D |
| 103 | | | | | | | | | | | | | | |
| Phage- | N | H | — | L | — | — | D | — | — | W | — | — | I | D |
| 104 | | | | | | | | | | | | | | |
| Phage- | D | A | — | L | — | W | R | — | — | — | — | — | T | N |
| 105 | | | | | | | | | | | | | | |
| Phage- | D | H | — | V | — | — | Q | — | — | F | — | — | I | D |
| 106 | | | | | | | | | | | | | | |
| Phage- | A | T | — | S | — | F | Q | — | — | — | — | — | H | I |
| 107 | | | | | | | | | | | | | | |
| Phage- | — | N | — | — | — | — | — | — | — | F | — | — | T | D |
| 108 | | | | | | | | | | | | | | |
| Phage- | D | T | — | — | — | — | — | — | — | F | — | — | I | — |
| 109 | | | | | | | | | | | | | | |
| Phage- | — | — | — | W | — | — | R | — | — | — | — | — | N | D |
| 110 | | | | | | | | | | | | | | |
| Phage- | D | H | — | M | — | — | — | — | — | W | — | — | — | D |
| 111 | | | | | | | | | | | | | | |
| Phage- | N | T | — | — | — | M | D | — | I | W | — | — | H | D |
| 112 | | | | | | | | | | | | | | |
| Phage- | V | S | — | L | — | — | — | — | — | W | — | — | H | I |
| 113 | | | | | | | | | | | | | | |
| Phage- | H | S | — | — | — | F | — | — | — | — | — | — | N | V |
| 114 | | | | | | | | | | | | | | |
| Phage- | D | H | — | — | — | — | Q | — | — | W | — | — | I | S |
| 115 | | | | | | | | | | | | | | |
| Phage- | — | N | — | V | — | — | N | — | — | W | — | — | I | D |
| 116 | | | | | | | | | | | | | | |
| Phage- | N | H | — | V | — | — | N | — | — | W | — | — | H | D |
| 117 | | | | | | | | | | | | | | |
| Phage- | T | N | — | V | — | — | N | — | — | W | — | — | L | D |
| 118 | | | | | | | | | | | | | | |
| Phage- | D | T | — | — | — | — | R | — | — | — | — | — | I | D |
| 119 | | | | | | | | | | | | | | |
| Phage- | N | A | — | L | — | L | — | — | — | — | — | — | I | D |
| 120 | | | | | | | | | | | | | | |
| Phage- | T | S | — | E | — | W | — | — | — | W | — | — | H | S |
| 121 | | | | | | | | | | | | | | |
| Phage- | — | H | — | — | — | — | — | — | V | F | — | — | D | D |
| 122 | | | | | | | | | | | | | | |
| Phage- | N | A | — | W | — | I | Q | — | — | — | — | Y | T | D |
| 123 | | | | | | | | | | | | | | |
| Phage- | N | S | — | L | — | F | Q | — | — | F | — | — | H | S |
| 124 | | | | | | | | | | | | | | |
| Phage- | — | D | — | V | — | — | — | — | — | — | — | — | N | I |
| 125 | | | | | | | | | | | | | | |
| Phage- | H | S | — | W | — | I | N | — | — | — | — | — | H | D |
| 126 | | | | | | | | | | | | | | |
| Phage- | Y | A | — | — | — | — | — | — | — | W | — | — | N | A |
| 127 | | | | | | | | | | | | | | |
| Phage- | A | H | — | W | — | W | — | — | — | W | — | — | — | D |
| 128 | | | | | | | | | | | | | | |
| Phage- | D | Y | — | M | — | F | R | — | — | W | — | — | H | S |
| 129 | | | | | | | | | | | | | | |
| Phage- | — | — | W | L | — | M | L | K | — | Q | — | F | Y | N |
| 130 | | | | | | | | | | | | | | |
| Phage- | Y | H | F | M | — | — | N | D | F | D | — | — | F | I |
| 131 | | | | | | | | | | | | | | |
| Phage- | Y | H | F | L | — | L | N | E | — | — | — | — | A | I |
| 132 | | | | | | | | | | | | | | |
| Phage- | N | — | — | — | — | Y | H | — | V | — | — | — | — | N |
| 133 | | | | | | | | | | | | | | |
| Phage- | N | F | E | L | — | L | — | — | — | Q | — | S | F | A |
| 134 | | | | | | | | | | | | | | |
| Phage- | Y | H | F | L | — | M | N | D | — | E | — | — | Y | I |
| 135 | | | | | | | | | | | | | | |
| Phage- | N | Y | V | L | — | L | T | K | — | P | — | — | — | I |
| 136 | | | | | | | | | | | | | | |
| Phage- | A | Y | — | V | — | — | — | — | — | F | — | — | T | H |
| 137 | | | | | | | | | | | | | | |
| Phage- | Y | D | — | L | — | — | — | Q | — | Q | — | R | Y | H |
| 138 | | | | | | | | | | | | | | |
| Phage- | D | L | — | M | — | — | R | — | — | — | — | — | I | N |
| 139 | | | | | | | | | | | | | | |
| Phage- | F | D | F | L | — | F | D | E | W | Q | — | L | Y | L |
| 140 | | | | | | | | | | | | | | |
| Phage- | D | F | — | V | — | — | R | — | — | — | | — | I | D |
| 141 | | | | | | | | | | | | | | |
| Phage- | L | H | R | L | — | F | E | — | F | Q | — | R | N | Y |
| 142 | | | | | | | | | | | | | | |
| Phage- | F | N | — | M | — | A | Q | D | R | D | — | A | S | D |
| 143 | | | | | | | | | | | | | | |
| Phage- | — | A | — | — | — | F | Q | — | V | — | — | — | H | S |
| 144 | | | | | | | | | | | | | | |
| Phage- | A | D | — | — | — | — | — | — | — | W | — | — | T | S |
| 145 | | | | | | | | | | | | | | |
| Phage- | H | S | — | — | — | — | — | — | — | F | — | — | N | D |
| 146 | | | | | | | | | | | | | | |
| Phage- | N | F | — | V | — | — | Q | — | — | — | — | — | I | D |
| 147 | | | | | | | | | | | | | | |
| Phage- | F | S | — | M | — | — | Q | — | — | — | — | — | H | V |
| 148 | | | | | | | | | | | | | | |
| Phage- | N | A | — | L | — | L | N | H | — | Q | — | — | H | — |
| 149 | | | | | | | | | | | | | | |
| Phage- | A | H | — | L | — | — | Q | R | P | Q | — | R | — | D |
| 150 | | | | | | | | | | | | | | |
| Phage- | — | D | — | — | — | L | Q | — | V | — | — | — | H | — |
| 151 | | | | | | | | | | | | | | |
| Phage- | — | T | V | Q | — | I | E | T | P | Q | — | L | I | H |
| 152 | | | | | | | | | | | | | | |
| Phage- | V | — | — | L | — | — | N | — | V | M | — | — | P | V |
| 153 | | | | | | | | | | | | | | |
| Phage- | D | S | — | V | — | — | — | — | — | — | — | — | I | N |
| 154 | | | | | | | | | | | | | | |
| Phage- | V | F | — | — | — | — | E | — | H | Q | — | S | — | Y |
| 155 | | | | | | | | | | | | | | |
| Phage- | D | S | — | L | — | — | — | R | R | Q | — | — | H | L |
| 156 | | | | | | | | | | | | | | |
| Phage- | F | — | — | — | — | G | N | D | Q | Q | — | — | A | S |
| 157 | | | | | | | | | | | | | | |
| Phage- | I | P | R | L | — | L | H | K | — | W | — | G | N | S |
| 158 | | | | | | | | | | | | | | |
| Phage- | V | S | — | M | — | — | — | — | V | F | — | — | Y | A |
| 159 | | | | | | | | | | | | | | |
| Phage- | H | T | — | L | — | F | H | — | — | W | — | — | H | D |
| 160 | | | | | | | | | | | | | | |
| Phage- | N | A | — | W | — | — | N | — | — | — | — | — | — | S |
| 161 | | | | | | | | | | | | | | |
| Phage- | I | T | — | Q | — | — | Q | Q | — | S | — | S | L | V |
| 162 | | | | | | | | | | | | | | |
| Phage- | N | I | — | V | — | — | N | — | — | W | — | — | I | D |
| 163 | | | | | | | | | | | | | | |
| Phage- | P | S | — | — | — | F | Q | — | — | — | — | — | I | D |
| 164 | | | | | | | | | | | | | | |
| Phage- | D | Y | V | L | — | — | G | S | — | P | — | — | P | I |
| 165 | | | | | | | | | | | | | | |
| Phage- | Y | Y | F | L | — | F | S | S | — | N | — | V | Y | V |
| 166 | | | | | | | | | | | | | | |
| Phage- | T | N | F | L | — | G | — | — | — | Q | — | L | I | A |
| 167 | | | | | | | | | | | | | | |
| Phage- | H | Y | P | L | — | — | S | — | — | Q | — | L | — | Y |
| 168 | | | | | | | | | | | | | | |
| Phage- | N | H | — | L | — | — | Q | — | — | — | — | — | Y | D |
| 169 | | | | | | | | | | | | | | |
| Phage- | D | S | V | — | — | — | — | K | — | Q | — | — | D | N |
| 170 | | | | | | | | | | | | | | |
| Phage- | — | — | V | L | — | — | L | — | G | Q | — | F | S | A |
| 171 | | | | | | | | | | | | | | |
| Phage- | V | D | — | S | — | L | — | K | — | Q | — | L | N | A |
| 172 | | | | | | | | | | | | | | |
| Phage- | I | H | R | L | — | T | — | I | R | — | — | F | Y | Y |
| 173 | | | | | | | | | | | | | | |
| Phage- | D | Y | — | — | — | — | — | — | — | — | — | — | H | N |
| 174 | | | | | | | | | | | | | | |
| Phage- | F | T | Q | — | — | A | R | K | M | Q | — | Q | D | N |
| 175 | | | | | | | | | | | | | | |
| Phage- | I | — | — | — | — | G | R | — | — | — | — | — | Y | A |
| 176 | | | | | | | | | | | | | | |
| Phage- | L | Y | — | G | — | R | R | Q | — | L | — | D | D | V |
| 177 | | | | | | | | | | | | | | |
| Phage- | Y | T | — | L | — | A | — | K | Q | H | — | S | A | N |
| 178 | | | | | | | | | | | | | | |
| Phage- | H | — | V | L | — | T | S | E | — | Q | — | Q | Y | S |
| 179 | | | | | | | | | | | | | | |
| Phage- | D | T | — | M | — | I | — | — | — | — | — | — | I | D |
| 180 | | | | | | | | | | | | | | |
| Phage- | — | D | — | L | — | — | R | — | — | — | — | — | I | Y |
| 181 | | | | | | | | | | | | | | |
| Phage- | Y | S | — | M | — | I | Q | — | — | — | — | — | N | D |
| 182 | | | | | | | | | | | | | | |
| Phage- | N | T | — | — | — | — | A | — | — | — | — | — | I | N |
| 183 | | | | | | | | | | | | | | |
| Phage- | — | F | — | — | — | — | Q | — | I | — | — | — | H | N |
| 184 | | | | | | | | | | | | | | |
| Phage- | Y | S | — | Y | — | — | R | — | — | — | — | — | S | D |
| 185 | | | | | | | | | | | | | | |
| Phage- | D | T | — | — | — | — | R | — | — | — | — | — | I | S |
| 186 | | | | | | | | | | | | | | |
| Phage- | Y | D | — | V | — | — | H | — | I | — | — | — | N | F |
| 187 | | | | | | | | | | | | | | |
| Phage- | D | — | — | K | — | — | — | — | — | W | — | — | I | D |
| 188 | | | | | | | | | | | | | | |
| Phage- | N | D | — | — | — | F | Q | — | — | — | — | — | T | D |
| 189 | | | | | | | | | | | | | | |
| Phage- | N | A | — | — | — | — | R | — | — | — | — | — | — | N |
| 190 | | | | | | | | | | | | | | |
| Phage- | — | N | — | L | — | I | — | — | — | — | — | — | H | D |
| 191 | | | | | | | | | | | | | | |
| Phage- | T | T | — | Y | — | — | R | — | — | — | — | — | H | — |
| 192 | | | | | | | | | | | | | | |
| Phage- | A | — | — | V | — | F | Q | — | — | — | — | — | I | D |
| 193 | | | | | | | | | | | | | | |
| Phage- | F | D | — | — | — | — | Q | — | — | — | — | — | N | — |
| 194 | | | | | | | | | | | | | | |
| Phage- | P | T | — | L | — | — | Q | — | — | F | — | — | I | A |
| 195 | | | | | | | | | | | | | | |
| Phage- | H | T | — | — | — | — | Q | — | — | — | — | — | I | D |
| 196 | | | | | | | | | | | | | | |
| Phage- | A | T | — | — | — | — | R | — | — | — | — | — | I | D |
| 197 | | | | | | | | | | | | | | |
| Phage- | N | S | — | — | — | L | — | — | — | — | — | — | — | D |
| 198 | | | | | | | | | | | | | | |
| Phage- | T | N | — | V | — | — | — | — | — | W | — | — | H | D |
| 199 | | | | | | | | | | | | | | |
| Phage- | D | — | — | Q | — | I | — | — | — | — | — | — | I | D |
| 200 | | | | | | | | | | | | | | |
| Phage- | N | — | — | — | — | L | — | — | — | E | — | — | I | D |
| 201 | | | | | | | | | | | | | | |
| Phage- | D | T | — | Y | — | — | — | — | — | W | — | — | I | D |
| 202 | | | | | | | | | | | | | | |
| Phage- | N | T | — | — | — | — | — | — | — | — | — | — | T | D |
| 203 | | | | | | | | | | | | | | |
| Phage- | T | T | — | W | — | — | Q | — | — | — | — | — | H | L |
| 204 | | | | | | | | | | | | | | |
| Phage- | A | L | — | M | — | — | N | — | — | W | — | — | H | D |
| 205 | | | | | | | | | | | | | | |
| Phage- | N | T | — | — | — | — | Q | — | — | F | — | — | — | D |
| 206 | | | | | | | | | | | | | | |
| Phage- | N | S | — | V | — | — | — | — | — | — | — | — | — | D |
| 207 | | | | | | | | | | | | | | |
| Phage- | N | S | — | — | — | — | Q | — | — | — | — | — | I | D |
| 208 | | | | | | | | | | | | | | |
| Phage- | N | A | — | L | — | — | — | — | V | — | — | — | I | A |
| 209 | | | | | | | | | | | | | | |
| Phage- | N | D | — | V | — | — | M | — | — | W | — | — | N | D |
| 210 | | | | | | | | | | | | | | |
| Phage- | Y | D | — | — | — | — | N | — | — | W | — | — | H | D |
| 211 | | | | | | | | | | | | | | |
| Phage- | D | T | — | L | — | — | — | — | — | F | — | Y | I | I |
| 212 | | | | | | | | | | | | | | |
| Phage- | N | S | — | — | — | I | H | — | — | — | — | — | I | D |
| 213 | | | | | | | | | | | | | | |
| Phage- | A | S | — | M | — | — | N | — | — | W | — | — | H | — |
| 214 | | | | | | | | | | | | | | |
| Phage- | Y | A | — | V | — | — | Q | — | I | — | — | — | N | Y |
| 215 | | | | | | | | | | | | | | |
| Phage- | D | S | — | I | — | — | R | — | — | — | — | — | H | Y |
| 216 | | | | | | | | | | | | | | |
| Phage- | N | — | — | I | — | — | N | — | V | — | — | — | I | D |
| 217 | | | | | | | | | | | | | | |
| Phage- | N | T | — | — | — | — | — | — | — | — | — | — | T | Y |
| 218 | | | | | | | | | | | | | | |
| Phage- | N | — | — | L | — | I | D | — | — | — | — | — | I | D |
| 219 | | | | | | | | | | | | | | |
| Phage- | T | D | — | — | — | — | — | — | — | W | — | — | H | N |
| 220 | | | | | | | | | | | | | | |
| Phage- | A | S | — | M | — | — | R | — | — | — | — | — | N | D |
| 221 | | | | | | | | | | | | | | |
| Phage- | — | D | — | — | — | — | Q | — | V | — | — | — | H | H |
| 222 | | | | | | | | | | | | | | |
| Phage- | — | F | — | Y | — | — | Q | — | I | — | — | — | T | V |
| 223 | | | | | | | | | | | | | | |
| Phage- | A | S | — | — | — | — | R | — | — | — | — | — | N | D |
| 224 | | | | | | | | | | | | | | |
| Phage- | N | — | — | L | — | — | — | — | — | — | — | — | N | D |
| 225 | | | | | | | | | | | | | | |
| Phage- | — | I | — | L | — | — | — | — | — | — | — | — | H | V |
| 226 | | | | | | | | | | | | | | |
| Phage- | A | H | — | V | — | — | — | — | — | — | — | — | I | S |
| 227 | | | | | | | | | | | | | | |
| Phage- | H | A | — | — | — | — | — | — | — | — | — | — | N | D |
| 228 | | | | | | | | | | | | | | |
| Phage- | A | T | — | L | — | — | Q | — | V | F | — | — | H | S |
| 229 | | | | | | | | | | | | | | |
| Phage- | F | S | — | V | — | — | N | — | — | W | — | — | I | D |
| 230 | | | | | | | | | | | | | | |
| Phage- | H | A | — | — | — | — | Q | — | — | — | — | — | T | D |
| 231 | | | | | | | | | | | | | | |
| Phage- | Y | D | — | V | — | — | R | — | — | — | — | — | N | I |
| 232 | | | | | | | | | | | | | | |
| Phage- | N | S | — | V | — | — | M | — | V | — | — | — | H | I |
| 233 | | | | | | | | | | | | | | |
| Phage- | N | L | — | V | — | — | — | — | — | — | — | — | I | D |
| 234 | | | | | | | | | | | | | | |
| Phage- | — | S | — | — | — | L | R | — | — | — | — | — | N | A |
| 235 | | | | | | | | | | | | | | |
| Phage- | A | T | — | M | — | — | N | — | I | H | — | — | I | A |
| 236 | | | | | | | | | | | | | | |
| Phage- | T | — | — | R | — | F | R | K | D | Q | — | I | F | S |
| 237 | | | | | | | | | | | | | | |
| Phage- | N | S | — | H | — | I | Q | — | — | — | — | — | I | I |
| 238 | | | | | | | | | | | | | | |
| Phage- | D | I | — | W | — | — | R | — | — | — | — | — | H | I |
| 239 | | | | | | | | | | | | | | |
| Phage- | T | S | — | — | — | L | Q | — | — | — | — | — | H | D |
| 240 | | | | | | | | | | | | | | |
| Phage- | F | T | — | — | — | — | Q | — | — | — | — | — | N | — |
| 241 | | | | | | | | | | | | | | |
| Phage- | — | S | — | Y | — | F | — | — | — | — | — | — | T | I |
| 242 | | | | | | | | | | | | | | |
| Phage- | N | T | — | I | — | F | — | — | — | — | — | — | I | A |
| 243 | | | | | | | | | | | | | | |
| Phage- | N | S | — | L | — | — | Q | — | I | — | — | — | I | D |
| 244 | | | | | | | | | | | | | | |
| Phage- | D | H | — | V | — | — | N | — | — | L | — | — | I | A |
| 245 | | | | | | | | | | | | | | |
| Phage- | — | S | — | — | — | — | Q | — | — | — | — | — | T | D |
| 246 | | | | | | | | | | | | | | |
| Phage- | V | S | — | — | — | L | E | — | I | — | — | — | H | N |
| 247 | | | | | | | | | | | | | | |
| Phage- | A | T | — | — | — | L | Q | — | — | — | — | — | I | S |
| 248 | | | | | | | | | | | | | | |
| Phage- | H | D | — | M | — | — | Q | — | I | — | — | — | N | I |
| 249 | | | | | | | | | | | | | | |
| Phage- | L | L | C | V | Q | N | L | Y | C | W | N | T | G | G |
| 250 | | | | | | | | | | | | | | |
| Phage- | N | S | — | V | — | — | N | — | V | — | — | — | — | V |
| 251 | | | | | | | | | | | | | | |
| Phage- | N | F | — | L | — | — | — | — | V | — | — | — | I | D |
| 252 | | | | | | | | | | | | | | |
| Phage- | — | A | — | — | — | — | Q | — | — | — | — | — | T | D |
| 253 | | | | | | | | | | | | | | |
| Phage- | L | D | — | H | — | — | Q | — | V | — | — | — | I | S |
| 254 | | | | | | | | | | | | | | |
| Phage- | D | T | — | — | — | — | R | — | — | — | — | — | I | — |
| 255 | | | | | | | | | | | | | | |
| Phage- | F | S | — | — | — | — | N | — | — | — | — | — | T | D |
| 256 | | | | | | | | | | | | | | |
| Phage- | D | — | — | V | — | — | — | — | — | — | — | — | I | H |
| 257 | | | | | | | | | | | | | | |
| Phage- | — | D | — | — | — | F | Q | — | — | — | — | — | H | D |
| 258 | | | | | | | | | | | | | | |
| Phage- | — | Y | — | V | — | — | Q | — | V | — | — | — | — | A |
| 259 | | | | | | | | | | | | | | |
| Phage- | T | N | — | M | — | — | R | — | — | — | — | — | H | V |
| 260 | | | | | | | | | | | | | | |
| Phage- | N | L | — | V | — | F | R | — | V | — | — | — | H | N |
| 261 | | | | | | | | | | | | | | |
| Phage- | N | T | — | L | — | — | Q | — | — | — | — | — | I | D |
| 262 | | | | | | | | | | | | | | |
| Phage- | N | L | — | — | — | — | N | — | — | W | — | — | N | D |
| 263 | | | | | | | | | | | | | | |
| Phage- | D | A | — | W | — | Y | Q | — | I | — | — | — | I | D |
| 264 | | | | | | | | | | | | | | |
| Phage- | H | Y | — | L | — | — | — | — | V | — | — | — | T | V |
| 265 | | | | | | | | | | | | | | |
| Phage- | D | S | — | — | — | F | — | — | V | — | — | — | L | A |
| 266 | | | | | | | | | | | | | | |
| Phage- | V | S | — | V | — | — | — | — | I | — | — | — | H | D |
| 267 | | | | | | | | | | | | | | |
| Phage- | L | S | — | — | — | — | — | — | — | — | — | — | T | D |
| 268 | | | | | | | | | | | | | | |
| Phage- | N | S | — | — | — | — | R | — | I | — | — | — | H | D |
| 269 | | | | | | | | | | | | | | |
| Phage- | — | H | — | — | — | — | Q | — | I | — | — | — | — | I |
| 270 | | | | | | | | | | | | | | |
| Phage- | N | T | — | M | — | F | E | — | — | — | — | — | I | D |
| 271 | | | | | | | | | | | | | | |
| Phage- | F | S | — | — | — | — | E | — | V | — | — | — | N | D |
| 272 | | | | | | | | | | | | | | |
| Phage- | N | A | — | — | — | W | Q | — | — | — | — | — | N | D |
| 273 | | | | | | | | | | | | | | |
| Phage- | N | — | — | R | — | — | Q | — | — | — | — | — | I | D |
| 274 | | | | | | | | | | | | | | |
| Phage- | Y | S | — | L | — | F | Q | — | M | — | — | — | N | V |
| 275 | | | | | | | | | | | | | | |
| Phage- | T | H | — | V | — | — | R | — | — | — | — | — | — | I |
| 276 | | | | | | | | | | | | | | |
| Phage- | F | S | — | Y | — | F | Q | — | — | — | — | — | H | D |
| 277 | | | | | | | | | | | | | | |
| Phage- | N | S | — | — | — | — | — | — | V | — | — | — | N | D |
| 278 | | | | | | | | | | | | | | |
| Phage- | D | H | — | L | — | — | N | — | — | W | — | — | I | S |
| 279 | | | | | | | | | | | | | | |
| Phage- | N | S | — | — | — | — | — | — | — | — | — | — | I | I |
| 280 | | | | | | | | | | | | | | |
| Phage- | T | D | — | V | — | — | — | — | — | — | — | — | H | S |
| 281 | | | | | | | | | | | | | | |
| Phage- | F | A | — | Y | — | I | E | — | V | H | — | — | H | I |
| 282 | | | | | | | | | | | | | | |
| Phage- | A | A | — | I | — | I | — | — | — | W | — | — | H | A |
| 283 | | | | | | | | | | | | | | |
| Phage- | H | T | — | V | — | — | — | — | — | — | — | — | I | N |
| 284 | | | | | | | | | | | | | | |
| Phage- | Y | H | — | — | — | — | — | — | — | — | — | — | N | V |
| 285 | | | | | | | | | | | | | | |
| Phage- | D | L | — | — | — | F | R | — | — | W | — | — | N | N |
| 286 | | | | | | | | | | | | | | |
| Phage- | Y | D | — | — | — | — | R | — | — | — | — | — | H | D |
| 287 | | | | | | | | | | | | | | |
| Phage- | N | A | — | L | — | F | Q | — | I | — | — | — | — | D |
| 288 | | | | | | | | | | | | | | |
| Phage- | D | — | — | V | — | L | R | — | — | F | — | — | — | D |
| 289 | | | | | | | | | | | | | | |
| Phage- | Y | H | — | W | — | — | — | — | V | — | — | — | N | D |
| 290 | | | | | | | | | | | | | | |
| Phage- | N | T | — | — | — | — | H | — | — | — | — | — | H | V |
| 291 | | | | | | | | | | | | | | |
| Phage- | N | I | — | L | — | — | Q | — | — | — | — | — | I | D |
| 292 | | | | | | | | | | | | | | |
| Phage- | N | A | — | — | — | — | R | — | — | — | — | — | N | A |
| 293 | | | | | | | | | | | | | | |
| Phage- | N | A | — | V | — | — | H | — | — | — | — | — | I | S |
| 294 | | | | | | | | | | | | | | |
| Phage- | Y | D | — | I | — | — | R | — | — | — | — | — | T | A |
| 295 | | | | | | | | | | | | | | |
| Phage- | N | T | — | L | — | — | — | — | — | W | — | — | H | D |
| 296 | | | | | | | | | | | | | | |
| Phage- | A | H | — | V | — | — | Q | — | — | — | — | — | I | S |
| 297 | | | | | | | | | | | | | | |
| Phage- | N | H | — | E | — | — | N | — | — | — | — | — | I | D |
| 298 | | | | | | | | | | | | | | |
| Phage- | N | T | — | — | — | — | — | — | — | — | — | — | I | D |
| 299 | | | | | | | | | | | | | | |
| Phage- | Y | D | — | V | — | — | — | — | — | W | — | — | H | — |
| 300 | | | | | | | | | | | | | | |
| Phage- | D | S | — | M | — | F | Q | — | — | — | — | — | H | V |
| 301 | | | | | | | | | | | | | | |
| Phage- | — | S | — | M | — | L | N | — | — | — | — | — | I | I |
| 302 | | | | | | | | | | | | | | |
| Phage- | Y | D | — | — | — | F | R | — | — | — | — | — | N | D |
| 303 | | | | | | | | | | | | | | |
| Phage- | Y | S | — | Q | — | I | N | — | — | W | — | — | H | D |
| 304 | | | | | | | | | | | | | | |
| Phage- | N | T | — | L | — | F | Q | — | — | W | — | — | T | N |
| 305 | | | | | | | | | | | | | | |
| Phage- | Y | P | — | M | — | F | Q | — | — | — | — | — | N | D |
| 306 | | | | | | | | | | | | | | |
| Phage- | V | S | — | — | — | F | Q | — | — | — | — | — | T | D |
| 307 | | | | | | | | | | | | | | |
| Phage- | D | — | — | — | — | F | Q | — | — | — | — | — | H | S |
| 308 | | | | | | | | | | | | | | |
| Phage- | Y | N | — | — | — | — | — | — | — | — | — | — | T | D |
| 309 | | | | | | | | | | | | | | |
| Phage- | L | D | — | L | — | — | R | — | I | — | — | — | I | S |
| 310 | | | | | | | | | | | | | | |
| Phage- | N | S | — | — | — | I | N | — | V | — | — | — | I | — |
| 311 | | | | | | | | | | | | | | |
| Phage- | — | D | — | V | — | — | H | — | — | W | — | — | H | D |
| 312 | | | | | | | | | | | | | | |
| Phage- | D | S | — | — | — | — | — | — | — | F | — | — | T | D |
| 313 | | | | | | | | | | | | | | |
| Phage- | D | S | — | V | — | — | — | — | — | W | — | — | I | — |
| 314 | | | | | | | | | | | | | | |
| Phage- | H | N | — | — | — | — | Q | — | — | W | — | — | N | D |
| 315 | | | | | | | | | | | | | | |
| Phage- | F | S | — | — | — | — | R | — | — | — | — | — | N | D |
| 316 | | | | | | | | | | | | | | |
| Phage- | F | S | — | — | — | — | N | — | — | — | — | — | N | D |
| 317 | | | | | | | | | | | | | | |
| Phage | D | H | — | L | — | — | Q | — | — | — | — | — | I | A |
| 318 | | | | | | | | | | | | | | |
| Phage- | H | T | — | — | — | — | — | — | V | — | — | — | L | D |
| 319 | | | | | | | | | | | | | | |
| Phage- | A | D | — | W | — | W | — | — | — | — | — | — | H | D |
| 320 | | | | | | | | | | | | | | |
| Phage- | N | S | — | V | — | W | H | — | — | — | — | — | N | N |
| 321 | | | | | | | | | | | | | | |
| Phage- | — | Y | — | W | — | — | — | — | — | — | — | — | N | D |
| 322 | | | | | | | | | | | | | | |
| Phage- | T | H | — | L | — | F | Q | — | I | — | — | — | Y | D |
| 323 | | | | | | | | | | | | | | |
| Phage- | A | L | — | — | — | I | — | — | — | — | — | — | N | S |
| 324 | | | | | | | | | | | | | | |
| Phage- | — | A | — | — | — | F | Q | — | — | — | — | — | N | A |
| 325 | | | | | | | | | | | | | | |
| Phage- | D | A | — | — | — | — | — | — | R | F | — | — | — | V |
| 326 | | | | | | | | | | | | | | |
| Phage- | H | S | — | — | — | — | — | — | — | — | — | — | N | N |
| 327 | | | | | | | | | | | | | | |
| Phage- | N | H | — | — | — | I | Q | — | — | — | — | — | T | S |
| 328 | | | | | | | | | | | | | | |
| Phage- | T | — | — | — | | L | Q | — | V | — | — | — | N | I |
| 329 | | | | | | | | | | | | | | |
| Phage- | D | S | — | I | — | — | — | — | — | F | — | — | — | D |
| 330 | | | | | | | | | | | | | | |
| Phage- | — | D | — | L | — | — | R | — | — | — | — | — | H | D |
| 331 | | | | | | | | | | | | | | |
| Phage- | — | Y | — | V | — | F | Q | — | — | — | — | — | I | D |
| 332 | | | | | | | | | | | | | | |
| Phage- | Y | H | — | V | — | — | — | — | — | — | — | — | N | V |
| 333 | | | | | | | | | | | | | | |
| Phage- | N | H | — | V | — | — | — | — | V | W | — | Y | I | D |
| 334 | | | | | | | | | | | | | | |
| Phage- | T | D | — | L | — | W | R | — | — | — | — | — | Y | D |
| 335 | | | | | | | | | | | | | | |
| Phage- | H | Y | — | E | — | L | Q | — | V | S | — | — | I | — |
| 336 | | | | | | | | | | | | | | |
| Phage- | F | S | — | M | — | E | — | — | — | W | — | — | L | V |
| 337 | | | | | | | | | | | | | | |
| Phage- | T | S | — | M | — | — | — | — | I | F | — | — | N | — |
| 338 | | | | | | | | | | | | | | |
| Phage- | N | — | — | Y | — | — | Q | — | V | — | — | — | I | — |
| 339 | | | | | | | | | | | | | | |
| Phage- | A | N | — | V | — | — | H | — | — | W | — | — | I | D |
| 340 | | | | | | | | | | | | | | |
| Phage- | Y | D | — | — | — | F | — | — | — | — | — | — | H | V |
| 341 | | | | | | | | | | | | | | |
| Phage- | A | H | — | V | — | — | R | — | — | — | — | — | I | N |
| 342 | | | | | | | | | | | | | | |
| Phage- | N | T | — | — | — | | N | — | — | W | — | — | I | D |
| 343 | | | | | | | | | | | | | | |
| Phage- | Y | T | — | — | — | — | Q | — | — | — | — | — | T | V |
| 344 | | | | | | | | | | | | | | |
| Phage- | N | H | — | V | — | F | Q | — | — | — | — | — | H | D |
| 345 | | | | | | | | | | | | | | |
| Phage- | N | A | — | — | — | — | N | — | — | W | — | — | T | V |
| 346 | | | | | | | | | | | | | | |
| Phage- | N | S | — | L | — | F | H | — | — | — | — | — | — | N |
| 347 | | | | | | | | | | | | | | |
| Phage- | — | S | — | — | — | — | — | — | — | — | — | — | T | N |
| 348 | | | | | | | | | | | | | | |
| Phage- | N | T | — | — | — | F | H | — | V | — | — | — | N | D |
| 349 | | | | | | | | | | | | | | |
| Phage- | — | D | — | — | — | I | Q | — | V | — | — | — | H | D |
| 350 | | | | | | | | | | | | | | |
| Phage- | N | L | — | — | — | — | — | — | — | — | — | — | I | D |
| 351 | | | | | | | | | | | | | | |
| Phage- | H | D | — | — | — | F | Q | — | V | — | — | — | T | V |
| 352 | | | | | | | | | | | | | | |
| Phage- | V | N | — | M | — | — | R | — | — | — | — | — | I | D |
| 353 | | | | | | | | | | | | | | |
| Phage- | Y | S | — | Y | — | — | — | — | — | — | — | — | T | H |
| 354 | | | | | | | | | | | | | | |
| Phage- | V | S | — | L | — | — | — | — | — | — | — | — | H | S |
| 355 | | | | | | | | | | | | | | |
| Phage- | V | D | — | M | — | I | — | — | — | W | — | — | H | N |
| 356 | | | | | | | | | | | | | | |
| Phage- | D | T | — | V | — | — | — | — | — | W | — | — | I | D |
| 357 | | | | | | | | | | | | | | |
| Phage- | N | T | — | V | — | — | — | — | — | W | — | — | I | N |
| 358 | | | | | | | | | | | | | | |
| Phage- | V | S | — | — | — | — | — | — | — | — | — | — | H | S |
| 359 | | | | | | | | | | | | | | |
| Phage- | P | S | — | — | — | — | N | — | — | F | — | — | I | D |
| 360 | | | | | | | | | | | | | | |
| Phage- | N | S | — | S | — | — | R | — | — | — | — | — | I | V |
| 361 | | | | | | | | | | | | | | |
| Phage- | T | S | — | — | — | — | Q | — | — | F | — | — | H | A |
| 362 | | | | | | | | | | | | | | |
| Phage- | — | D | — | — | — | — | — | — | — | — | — | — | N | — |
| 363 | | | | | | | | | | | | | | |
| Phage- | H | S | — | — | — | — | — | — | — | — | — | — | T | N |
| 364 | | | | | | | | | | | | | | |
| Phage- | A | T | — | M | — | — | N | — | — | W | — | — | I | N |
| 365 | | | | | | | | | | | | | | |
| Phage- | A | S | — | V | — | F | Q | — | — | — | — | — | H | S |
| 366 | | | | | | | | | | | | | | |
| Phage- | N | H | — | V | — | — | N | — | — | — | — | — | I | N |
| 367 | | | | | | | | | | | | | | |
| Phage- | N | N | — | — | — | H | — | — | — | F | — | — | — | N |
| 368 | | | | | | | | | | | | | | |
| Phage- | A | A | — | — | — | — | — | — | — | — | — | — | — | D |
| 369 | | | | | | | | | | | | | | |
| Phage- | — | D | — | I | — | — | R | — | — | — | — | — | I | D |
| 370 | | | | | | | | | | | | | | |
| Phage- | A | T | — | — | — | — | Q | — | — | — | — | — | H | S |
| 371 | | | | | | | | | | | | | | |
| Phage- | — | T | — | V | — | — | R | — | — | — | — | — | N | A |
| 372 | | | | | | | | | | | | | | |
| Phage- | T | D | — | M | — | — | R | — | — | — | — | — | N | N |
| 373 | | | | | | | | | | | | | | |
| Phage- | Y | T | — | — | — | — | N | — | — | — | — | — | T | H |
| 374 | | | | | | | | | | | | | | |
| Phage- | Y | S | — | I | — | — | R | — | — | — | — | — | A | D |
| 375 | | | | | | | | | | | | | | |
| Phage- | N | T | — | V | — | — | N | — | — | — | — | — | I | Y |
| 376 | | | | | | | | | | | | | | |
| Phage- | T | T | — | — | — | F | Q | — | — | — | — | — | H | V |
| 377 | | | | | | | | | | | | | | |
| Phage- | N | I | — | M | — | — | R | — | — | — | — | — | I | H |
| 378 | | | | | | | | | | | | | | |
| Phage- | F | S | — | V | — | — | — | — | V | — | — | — | H | I |
| 379 | | | | | | | | | | | | | | |
| Phage- | N | — | — | I | — | — | Q | — | — | — | — | — | I | D |
| 380 | | | | | | | | | | | | | | |
| Phage- | D | T | — | S | — | — | R | — | V | F | — | — | I | V |
| 381 | | | | | | | | | | | | | | |
| Phage- | D | L | — | — | — | I | R | — | — | — | — | — | I | N |
| 382 | | | | | | | | | | | | | | |
| Phage- | A | H | — | V | — | — | N | — | — | — | — | — | T | D |
| 383 | | | | | | | | | | | | | | |
| Phage- | D | N | — | I | — | — | — | — | — | Q | — | — | T | I |
| 384 | | | | | | | | | | | | | | |
| Phage- | L | T | — | — | — | — | — | — | — | — | — | — | H | A |
| 385 | | | | | | | | | | | | | | |
| Phage- | N | T | — | L | — | — | D | — | — | W | — | — | I | D |
| 386 | | | | | | | | | | | | | | |
| Phage- | P | A | — | — | — | — | — | — | I | — | — | — | I | D |
| 387 | | | | | | | | | | | | | | |
| Phage- | N | T | — | — | — | F | R | — | — | W | — | — | N | D |
| 388 | | | | | | | | | | | | | | |
| Phage- | H | S | — | — | — | — | M | — | — | — | — | — | I | — |
| 389 | | | | | | | | | | | | | | |
| Phage- | P | T | — | M | — | — | R | — | — | — | — | — | — | — |
| 390 | | | | | | | | | | | | | | |
| Phage- | N | Y | — | — | — | L | — | — | — | — | — | — | I | D |
| 391 | | | | | | | | | | | | | | |
| Phage- | Y | S | — | M | — | — | — | — | — | — | — | — | H | N |
| 392 | | | | | | | | | | | | | | |
| Phage- | N | I | — | L | — | L | — | — | I | — | — | — | H | V |
| 393 | | | | | | | | | | | | | | |
| Phage- | Y | T | — | L | — | — | N | — | — | — | — | — | T | V |
| 394 | | | | | | | | | | | | | | |
| Phage- | T | H | — | L | — | F | Q | — | — | — | — | — | N | V |
| 395 | | | | | | | | | | | | | | |
| Phage- | — | T | — | L | — | F | Q | — | — | W | — | — | H | D |
| 396 | | | | | | | | | | | | | | |
| Phage- | T | H | — | — | — | — | Q | — | I | — | — | — | N | I |
| 397 | | | | | | | | | | | | | | |
| Phage- | N | S | — | M | — | — | R | — | V | L | — | — | I | — |
| 398 | | | | | | | | | | | | | | |
| Phage- | D | T | — | — | — | — | R | — | — | — | — | — | I | Y |
| 399 | | | | | | | | | | | | | | |
| Phage- | — | D | — | W | — | — | M | — | — | — | — | — | H | V |
| 400 | | | | | | | | | | | | | | |
| Phage- | N | S | — | V | — | F | — | — | — | — | — | — | I | N |
| 401 | | | | | | | | | | | | | | |
| Phage- | N | S | — | M | — | — | — | — | F | — | — | — | I | D |
| 402 | | | | | | | | | | | | | | |
| Phage- | N | S | — | V | — | — | — | — | — | — | — | — | I | N |
| 403 | | | | | | | | | | | | | | |
| Phage- | N | A | — | — | — | — | Q | — | — | — | — | — | — | D |
| 404 | | | | | | | | | | | | | | |
| Phage- | H | T | — | — | — | M | E | — | — | W | — | — | N | D |
| 405 | | | | | | | | | | | | | | |
| Phage- | N | Y | — | — | — | — | — | — | — | — | — | — | I | — |
| 406 | | | | | | | | | | | | | | |
| Phage- | N | S | — | W | — | — | — | — | — | — | — | — | T | D |
| 407 | | | | | | | | | | | | | | |
| Phage- | N | — | — | M | — | F | R | — | I | — | — | — | N | Y |
| 408 | | | | | | | | | | | | | | |
| Phage- | N | D | — | — | — | F | R | — | I | — | — | — | N | D |
| 409 | | | | | | | | | | | | | | |
| Phage- | Y | S | — | M | — | — | R | — | — | — | — | — | N | L |
| 410 | | | | | | | | | | | | | | |
| Phage- | N | T | — | — | — | — | R | — | — | — | — | — | — | N |
| 411 | | | | | | | | | | | | | | |
| Phage- | D | H | — | L | — | — | — | — | — | F | — | — | T | I |
| 412 | | | | | | | | | | | | | | |
| Phage- | Y | D | — | L | — | — | Q | — | I | — | — | — | H | V |
| 413 | | | | | | | | | | | | | | |
| Phage- | D | S | — | — | — | F | Q | — | — | W | — | — | T | D |
| 414 | | | | | | | | | | | | | | |
| Phage- | F | T | — | — | — | — | N | — | — | — | — | — | N | S |
| 415 | | | | | | | | | | | | | | |
| Phage- | A | A | — | — | — | — | — | — | — | — | — | — | T | D |
| 416 | | | | | | | | | | | | | | |
| Phage- | Y | S | — | — | — | — | — | — | I | — | — | — | — | V |
| 417 | | | | | | | | | | | | | | |
| Phage- | N | H | — | L | — | — | — | — | — | — | — | — | I | N |
| 418 | | | | | | | | | | | | | | |
| Phage- | F | S | — | M | — | — | Q | — | — | — | — | — | H | D |
| 419 | | | | | | | | | | | | | | |
| Phage- | A | S | — | Y | — | — | M | — | I | — | — | — | T | I |
| 420 | | | | | | | | | | | | | | |
| Phage- | Q | D | — | W | — | — | D | — | — | W | — | — | I | D |
| 421 | | | | | | | | | | | | | | |
| Phage- | A | D | — | I | — | — | R | — | — | — | — | — | I | D |
| 422 | | | | | | | | | | | | | | |
| Phage- | — | D | — | I | — | — | R | — | — | W | — | — | N | — |
| 423 | | | | | | | | | | | | | | |
| Phage- | N | S | — | — | — | F | R | — | — | — | — | — | T | — |
| 424 | | | | | | | | | | | | | | |
| Phage- | — | S | — | — | — | F | Q | — | — | W | — | — | N | D |
| 425 | | | | | | | | | | | | | | |
| Phage- | F | T | — | — | — | — | Q | — | V | — | — | — | H | S |
| 426 | | | | | | | | | | | | | | |
| Phage- | F | S | — | Y | — | — | R | — | — | — | — | — | N | D |
| 427 | | | | | | | | | | | | | | |
| Phage- | H | D | — | — | — | — | R | — | — | — | — | — | N | D |
| 428 | | | | | | | | | | | | | | |
| Phage- | N | Y | — | V | — | L | N | — | I | — | — | — | I | A |
| 429 | | | | | | | | | | | | | | |
| Phage- | D | T | — | — | — | L | — | — | — | W | — | — | I | D |
| 430 | | | | | | | | | | | | | | |
| Phage- | T | S | — | — | — | — | H | — | I | — | — | — | H | S |
| 431 | | | | | | | | | | | | | | |
| Phage- | Y | S | — | — | — | — | R | — | — | — | — | — | N | V |
| 432 | | | | | | | | | | | | | | |
| Phage- | T | D | — | L | — | — | R | — | — | W | — | — | H | I |
| 433 | | | | | | | | | | | | | | |
| Phage- | L | A | — | — | — | — | — | — | — | — | — | — | N | D |
| 434 | | | | | | | | | | | | | | |
| Phage- | N | A | — | — | — | — | — | — | V | — | — | — | T | Y |
| 435 | | | | | | | | | | | | | | |
| Phage- | L | S | — | M | — | — | H | — | — | — | — | — | H | I |
| 436 | | | | | | | | | | | | | | |
| Phage- | F | T | M | — | — | — | Q | — | V | F | — | — | H | A |
| 437 | | | | | | | | | | | | | | |
| Phage- | N | S | — | — | — | — | Q | — | I | W | — | — | T | D |
| 438 | | | | | | | | | | | | | | |
| Phage- | H | A | — | I | — | — | N | — | — | W | — | — | N | — |
| 439 | | | | | | | | | | | | | | |
| Phage- | N | H | — | M | — | L | N | — | — | W | — | — | I | D |
| 440 | | | | | | | | | | | | | | |
| Phage- | N | Y | — | W | — | — | H | — | — | — | — | — | T | D |
| 441 | | | | | | | | | | | | | | |
| Phage- | N | A | — | M | — | — | N | — | I | W | — | — | I | D |
| 442 | | | | | | | | | | | | | | |
| Phage- | N | T | — | — | — | W | Q | — | — | — | — | — | I | V |
| 443 | | | | | | | | | | | | | | |
| Phage- | N | H | — | Y | — | W | — | — | — | — | — | — | I | D |
| 444 | | | | | | | | | | | | | | |
| Phage- | N | L | — | — | — | — | R | — | — | — | — | — | I | D |
| 445 | | | | | | | | | | | | | | |
| Phage- | Y | S | — | M | — | — | N | — | — | W | — | — | N | — |
| 446 | | | | | | | | | | | | | | |
| Phage- | G | S | — | L | — | — | — | — | — | — | — | — | I | D |
| 447 | | | | | | | | | | | | | | |
| Phage- | L | D | — | V | — | — | R | — | — | — | — | — | I | N |
| 448 | | | | | | | | | | | | | | |
| Phage- | N | A | — | L | — | — | Q | — | V | — | — | — | I | D |
| 449 | | | | | | | | | | | | | | |
| Phage- | Y | T | — | — | — | L | Q | — | V | — | — | Y | H | I |
| 450 | | | | | | | | | | | | | | |
| Phage- | N | Y | — | V | — | — | — | — | — | E | — | — | I | V |
| 451 | | | | | | | | | | | | | | |
| Phage- | — | F | — | T | — | I | Q | — | I | — | — | — | — | S |
| 452 | | | | | | | | | | | | | | |
| Phage- | L | A | — | — | — | Y | Q | — | — | F | — | — | I | N |
| 453 | | | | | | | | | | | | | | |
| Phage- | A | H | — | M | — | — | — | — | — | — | — | — | I | V |
| 454 | | | | | | | | | | | | | | |
| Phage- | — | D | — | I | — | — | — | — | — | — | — | — | Y | D |
| 455 | | | | | | | | | | | | | | |
| Phage- | H | A | — | — | — | — | N | — | — | W | — | — | N | — |
| 456 | | | | | | | | | | | | | | |
| Phage- | Y | T | — | — | — | I | Q | — | V | H | — | — | T | V |
| 457 | | | | | | | | | | | | | | |
| Phage- | D | N | — | R | — | — | R | — | — | — | — | — | I | D |
| 458 | | | | | | | | | | | | | | |
| Phage- | D | F | — | R | — | T | — | — | — | F | — | — | I | D |
| 459 | | | | | | | | | | | | | | |
| Phage- | D | H | — | L | — | F | R | — | V | — | — | — | H | I |
| 460 | | | | | | | | | | | | | | |
| Phage- | Y | — | — | L | — | — | — | — | V | — | — | — | N | E |
| 461 | | | | | | | | | | | | | | |
| Phage- | F | S | — | M | — | I | — | — | — | — | — | — | T | — |
| 462 | | | | | | | | | | | | | | |
| Phage- | T | H | — | L | — | — | — | — | I | — | — | — | H | V |
| 463 | | | | | | | | | | | | | | |
| Phage- | A | S | — | — | — | L | Q | — | — | — | — | — | N | Y |
| 464 | | | | | | | | | | | | | | |
| Phage- | H | D | — | V | — | — | N | — | — | W | — | — | N | D |
| 465 | | | | | | | | | | | | | | |
| Phage- | A | A | — | E | — | F | Q | — | — | W | — | — | — | I |
| 466 | | | | | | | | | | | | | | |
| Phage- | L | D | — | I | — | F | Q | — | V | — | — | — | Y | A |
| 467 | | | | | | | | | | | | | | |
| Phage- | N | D | — | H | — | — | M | — | — | — | — | — | — | Y |
| 468 | | | | | | | | | | | | | | |
| Phage- | N | T | — | L | — | I | E | — | — | — | — | — | I | D |
| 469 | | | | | | | | | | | | | | |
| Phage- | A | S | — | — | — | I | Q | — | — | — | — | — | T | D |
| 470 | | | | | | | | | | | | | | |
| Phage- | N | Y | — | V | — | — | N | — | — | W | — | — | I | S |
| 471 | | | | | | | | | | | | | | |
| Phage- | N | — | — | — | — | — | — | — | Y | — | — | — | I | I |
| 472 | | | | | | | | | | | | | | |
| Phage- | N | Y | — | — | L | Q | — | V | — | — | — | — | — | D |
| 473 | | | | | | | | | | | | | | |
| Phage- | F | S | — | H | — | F | — | — | V | — | — | — | — | V |
| 474 | | | | | | | | | | | | | | |
| Phage- | A | S | — | — | — | I | — | — | — | W | — | — | N | N |
| 475 | | | | | | | | | | | | | | |
| Phage- | Y | S | — | — | — | — | — | — | — | — | — | — | N | A |
| 476 | | | | | | | | | | | | | | |
| Phage- | T | Y | — | Y | — | F | Q | — | — | — | — | — | H | V |
| 477 | | | | | | | | | | | | | | |
| Phage- | N | — | — | — | — | I | N | — | — | W | — | — | T | — |
| 478 | | | | | | | | | | | | | | |
| Phage- | N | D | — | — | — | I | M | — | V | — | — | — | N | — |
| 479 | | | | | | | | | | | | | | |
| Phage- | N | T | — | — | — | — | R | — | — | — | — | — | N | S |
| 480 | | | | | | | | | | | | | | |
| Phage- | F | D | — | — | — | — | R | — | — | — | — | — | T | N |
| 481 | | | | | | | | | | | | | | |
| Phage- | N | F | — | W | — | — | N | — | V | — | — | — | I | D |
| 482 | | | | | | | | | | | | | | |
| Phage- | T | Y | — | — | — | F | Q | — | — | — | — | — | N | L |
| 483 | | | | | | | | | | | | | | |
| Phage- | N | S | — | M | — | — | M | — | — | — | — | — | I | — |
| 484 | | | | | | | | | | | | | | |
| Phage- | A | S | — | — | — | — | M | — | — | — | — | — | N | V |
| 485 | | | | | | | | | | | | | | |
| Phage- | N | T | — | — | — | — | — | — | — | — | — | — | I | A |
| 486 | | | | | | | | | | | | | | |
| Phage- | H | S | — | — | — | I | E | — | — | — | — | — | N | D |
| 487 | | | | | | | | | | | | | | |
| Phage- | A | D | — | I | — | — | M | — | V | — | — | — | — | S |
| 488 | | | | | | | | | | | | | | |
| Phage- | H | A | — | M | — | — | R | — | — | — | — | — | N | A |
| 489 | | | | | | | | | | | | | | |
| Phage- | Y | P | — | V | — | F | — | — | — | — | — | — | N | H |
| 490 | | | | | | | | | | | | | | |
| Phage- | — | H | — | — | — | Y | — | — | — | — | — | — | N | Y |
| 491 | | | | | | | | | | | | | | |
| Phage- | — | D | — | W | — | — | — | — | — | — | — | — | H | V |
| 492 | | | | | | | | | | | | | | |
| Phage- | F | S | — | — | — | — | — | — | — | — | — | — | H | A |
| 493 | | | | | | | | | | | | | | |
| Phage- | H | T | — | M | — | F | Q | — | — | — | — | — | H | N |
| 494 | | | | | | | | | | | | | | |
| Phage- | Y | S | — | — | — | — | N | — | — | W | — | — | — | D |
| 495 | | | | | | | | | | | | | | |
| Phage- | Y | P | — | — | — | — | R | — | — | — | — | — | N | D |
| 496 | | | | | | | | | | | | | | |
| Phage- | N | T | — | L | — | F | Q | — | — | — | — | — | I | D |
| 497 | | | | | | | | | | | | | | |
| Phage- | N | S | — | L | — | I | H | — | — | W | — | — | I | D |
| 498 | | | | | | | | | | | | | | |
| Phage- | T | N | — | W | — | — | R | — | V | L | — | — | H | S |
| 499 | | | | | | | | | | | | | | |
| Phage- | H | A | — | — | — | — | — | — | — | — | — | — | N | S |
| 500 | | | | | | | | | | | | | | |
| Phage- | H | T | — | V | — | — | R | — | — | — | — | — | H | N |
| 501 | | | | | | | | | | | | | | |
| Phage- | N | H | — | V | — | F | — | — | — | — | — | — | — | S |
| 502 | | | | | | | | | | | | | | |
| Phage- | A | T | — | L | — | — | — | — | — | W | — | — | H | — |
| 503 | | | | | | | | | | | | | | |
| Phage- | D | H | — | L | — | — | — | — | — | F | — | — | I | A |
| 504 | | | | | | | | | | | | | | |
| Phage- | L | D | — | — | — | W | R | — | — | — | — | — | N | A |
| 505 | | | | | | | | | | | | | | |
| Phage- | F | D | — | — | — | — | R | — | — | — | — | R | N | D |
| 506 | | | | | | | | | | | | | | |
| Phage- | Y | S | — | — | — | F | H | — | — | — | — | — | I | D |
| 507 | | | | | | | | | | | | | | |
| Phage- | N | T | — | M | — | — | Q | — | V | — | — | — | I | I |
| 508 | | | | | | | | | | | | | | |
| Phage- | N | A | — | — | — | — | R | — | — | — | — | — | N | F |
| 509 | | | | | | | | | | | | | | |
| Phage- | — | S | — | M | — | — | R | — | — | — | — | — | I | I |
| 510 | | | | | | | | | | | | | | |
| Phage- | H | — | — | — | — | — | Q | — | I | — | — | — | T | V |
| 511 | | | | | | | | | | | | | | |
| Phage- | — | S | — | M | — | — | N | — | — | — | — | — | T | V |
| 512 | | | | | | | | | | | | | | |
| Phage- | H | S | — | W | — | F | Q | — | — | — | — | — | N | A |
| 513 | | | | | | | | | | | | | | |
| Phage- | N | A | — | Y | — | — | — | — | — | W | — | — | I | D |
| 514 | | | | | | | | | | | | | | |
| Phage- | T | S | M | L | — | F | Q | — | — | — | — | — | H | V |
| 515 | | | | | | | | | | | | | | |
| Phage- | Y | D | — | I | — | — | — | — | — | W | — | — | T | — |
| 516 | | | | | | | | | | | | | | |
| Phage- | A | D | — | — | — | — | — | — | — | — | — | — | H | V |
| 517 | | | | | | | | | | | | | | |
| Phage- | A | S | — | — | — | — | — | — | — | — | — | — | N | A |
| 518 | | | | | | | | | | | | | | |
| Phage- | H | S | — | — | — | — | R | — | — | — | — | — | N | D |
| 519 | | | | | | | | | | | | | | |
| Phage- | N | Y | — | V | — | — | — | — | — | W | — | Y | I | N |
| 520 | | | | | | | | | | | | | | |
| Phage- | N | D | — | L | — | F | Q | — | I | — | — | — | N | V |
| 521 | | | | | | | | | | | | | | |
| Phage- | T | D | — | — | — | Y | R | — | — | W | — | — | H | D |
| 522 | | | | | | | | | | | | | | |
| Phage- | I | A | — | L | — | F | Q | — | V | — | — | — | H | I |
| 523 | | | | | | | | | | | | | | |
| Phage- | I | D | — | V | — | F | R | — | I | W | — | — | N | — |
| 524 | | | | | | | | | | | | | | |
| Phage- | N | A | — | — | — | F | H | — | — | — | — | — | I | D |
| 525 | | | | | | | | | | | | | | |
| Phage- | N | N | — | — | — | — | R | — | — | — | — | — | N | I |
| 526 | | | | | | | | | | | | | | |
| Phage- | D | T | — | — | — | — | Q | — | I | W | — | — | T | A |
| 527 | | | | | | | | | | | | | | |
| Phage- | Y | H | — | — | — | — | R | — | — | — | — | — | — | S |
| 528 | | | | | | | | | | | | | | |
| Phage- | F | S | — | L | — | — | R | — | — | — | — | — | T | V |
| 529 | | | | | | | | | | | | | | |
| Phage- | D | T | — | V | — | — | Q | — | — | — | — | — | I | S |
| 530 | | | | | | | | | | | | | | |
| Phage- | D | H | — | V | — | — | — | — | — | L | — | — | I | N |
| 531 | | | | | | | | | | | | | | |
| Phage- | N | Y | — | — | — | — | — | — | — | — | — | — | I | D |
| 532 | | | | | | | | | | | | | | |
| Phage- | H | S | — | — | — | — | N | — | — | — | — | — | T | S |
| 533 | | | | | | | | | | | | | | |
| Phage- | N | F | — | M | — | — | — | — | — | S | — | — | I | D |
| 534 | | | | | | | | | | | | | | |
| Phage- | F | A | — | — | — | — | N | — | — | — | — | — | N | D |
| 535 | | | | | | | | | | | | | | |
| Phage- | — | Y | — | Y | — | L | R | — | I | — | — | — | N | — |
| 536 | | | | | | | | | | | | | | |
| Phage- | T | S | — | L | — | — | — | — | — | W | — | — | N | V |
| 537 | | | | | | | | | | | | | | |
| Phage- | F | S | — | M | — | — | R | — | — | — | — | — | H | — |
| 538 | | | | | | | | | | | | | | |
| Phage- | N | Y | — | Y | — | L | — | — | — | — | — | — | N | I |
| 539 | | | | | | | | | | | | | | |
| Phage- | N | H | — | L | — | — | R | — | — | — | — | — | I | — |
| 540 | | | | | | | | | | | | | | |
| Phage- | N | Y | — | — | — | — | Q | — | V | — | — | — | I | A |
| 541 | | | | | | | | | | | | | | |
| Phage- | N | T | — | M | — | — | — | — | — | F | — | — | I | D |
| 542 | | | | | | | | | | | | | | |
| Phage- | D | Y | — | L | — | F | Q | — | V | — | — | — | H | I |
| 543 | | | | | | | | | | | | | | |
| Phage- | H | A | — | — | — | — | R | — | — | — | — | — | — | D |
| 544 | | | | | | | | | | | | | | |
| Phage- | — | D | — | — | — | — | M | — | V | — | — | — | H | I |
| 545 | | | | | | | | | | | | | | |
| Phage- | N | — | — | — | — | — | — | — | — | — | — | — | I | D |
| 546 | | | | | | | | | | | | | | |
| Phage- | — | S | — | — | — | F | Q | — | — | — | — | — | — | D |
| 547 | | | | | | | | | | | | | | |
| Phage- | N | T | — | — | — | — | — | — | — | — | — | — | T | S |
| 548 | | | | | | | | | | | | | | |
| Phage- | P | H | — | M | — | — | Q | — | I | — | — | — | I | I |
| 549 | | | | | | | | | | | | | | |
| Phage- | D | L | — | V | — | L | R | — | W | F | — | — | N | D |
| 550 | | | | | | | | | | | | | | |
| Phage- | H | D | — | — | — | — | R | — | — | W | — | — | N | A |
| 551 | | | | | | | | | | | | | | |
| Phage- | N | L | — | M | — | — | Q | — | — | — | — | — | I | A |
| 552 | | | | | | | | | | | | | | |
| Phage- | D | T | — | W | — | — | R | — | — | — | — | — | I | N |
| 553 | | | | | | | | | | | | | | |
| Phage- | N | — | — | V | — | — | N | — | — | W | — | — | I | D |
| 554 | | | | | | | | | | | | | | |
| Phage- | — | Y | — | — | — | F | — | — | — | — | — | — | N | D |
| 555 | | | | | | | | | | | | | | |
| Phage- | N | N | — | W | — | F | Q | — | — | — | — | — | H | V |
| 556 | | | | | | | | | | | | | | |
| Phage- | L | Y | — | M | — | — | — | — | — | — | — | — | I | N |
| 557 | | | | | | | | | | | | | | |
| Phage- | N | D | — | I | — | — | R | — | — | — | — | — | H | Y |
| 558 | | | | | | | | | | | | | | |
| Phage- | N | H | — | — | — | — | R | — | — | — | — | — | T | — |
| 559 | | | | | | | | | | | | | | |
| Phage- | N | A | — | L | — | — | — | — | — | — | — | — | I | D |
| 560 | | | | | | | | | | | | | | |
| Phage- | L | A | — | — | — | — | — | — | — | — | — | — | H | D |
| 561 | | | | | | | | | | | | | | |
| Phage- | N | A | — | V | — | — | Y | — | I | — | — | — | H | V |
| 562 | | | | | | | | | | | | | | |
| Phage- | N | N | — | Y | — | — | — | — | — | W | — | — | — | A |
| 563 | | | | | | | | | | | | | | |
| Phage- | Y | S | — | M | — | — | — | — | — | — | — | — | H | A |
| 564 | | | | | | | | | | | | | | |
| Phage- | N | A | — | L | — | — | N | — | — | W | — | — | I | D |
| 565 | | | | | | | | | | | | | | |
| Phage- | D | T | — | L | — | — | H | — | — | F | — | — | I | D |
| 566 | | | | | | | | | | | | | | |
| Phage- | N | N | — | Y | — | F | Q | — | V | F | — | — | I | A |
| 567 | | | | | | | | | | | | | | |
| Phage- | A | S | — | M | — | — | — | — | — | — | — | — | H | A |
| 568 | | | | | | | | | | | | | | |
| Phage- | T | A | — | — | — | F | Q | — | V | — | — | — | H | D |
| 569 | | | | | | | | | | | | | | |
| Phage- | N | — | — | V | — | — | Q | — | I | — | — | — | — | S |
| 570 | | | | | | | | | | | | | | |
| Phage- | N | N | — | M | — | F | — | — | — | — | — | — | H | I |
| 571 | | | | | | | | | | | | | | |
| Phage- | — | S | — | L | — | — | N | — | — | W | — | — | T | — |
| 572 | | | | | | | | | | | | | | |
| Phage- | N | S | — | — | — | — | M | — | I | — | — | — | H | D |
| 573 | | | | | | | | | | | | | | |
| Phage- | N | H | — | — | — | I | — | — | — | — | — | — | H | A |
| 574 | | | | | | | | | | | | | | |
| Phage- | F | S | — | — | — | — | — | — | — | — | — | — | T | N |
| 575 | | | | | | | | | | | | | | |
| Phage- | N | T | — | — | — | — | Q | — | V | F | — | — | T | Y |
| 576 | | | | | | | | | | | | | | |
| Phage- | N | A | — | — | — | F | — | — | — | — | — | — | T | Y |
| 577 | | | | | | | | | | | | | | |
| Phage- | N | T | — | L | — | — | — | — | — | — | — | — | I | D |
| 578 | | | | | | | | | | | | | | |
| Phage- | — | H | — | — | — | F | Q | — | — | — | — | — | N | A |
| 579 | | | | | | | | | | | | | | |
| Phage- | Y | T | — | — | — | F | Q | — | — | — | — | — | N | V |
| 580 | | | | | | | | | | | | | | |
| Phage- | H | S | — | — | — | — | — | — | — | — | — | — | T | I |
| 581 | | | | | | | | | | | | | | |
| Phage- | D | Y | — | L | — | F | R | — | — | — | — | — | Y | D |
| 582 | | | | | | | | | | | | | | |
| Phage- | Y | N | — | — | — | — | R | — | — | — | — | — | — | A |
| 583 | | | | | | | | | | | | | | |
| Phage- | Y | S | — | V | — | — | — | — | — | W | — | — | N | I |
| 584 | | | | | | | | | | | | | | |
| Phage- | F | N | — | — | — | — | — | — | — | — | — | — | N | D |
| 585 | | | | | | | | | | | | | | |
| Phage- | V | A | — | — | — | — | — | — | I | — | — | — | N | F |
| 586 | | | | | | | | | | | | | | |
| Phage- | D | Y | — | L | — | — | H | — | — | F | — | — | I | V |
| 587 | | | | | | | | | | | | | | |
| Phage- | D | T | — | L | — | — | — | — | — | F | — | — | I | D |
| 588 | | | | | | | | | | | | | | |
| Phage- | D | — | — | V | — | — | N | — | — | F | — | — | I | D |
| 589 | | | | | | | | | | | | | | |
| Phage- | N | Y | — | Y | — | — | Q | — | V | — | — | — | I | I |
| 590 | | | | | | | | | | | | | | |
| Phage- | N | S | — | Q | — | — | R | — | I | — | — | — | I | N |
| 591 | | | | | | | | | | | | | | |
| Phage- | Y | S | — | — | — | — | Q | — | — | — | — | — | N | A |
| 592 | | | | | | | | | | | | | | |
| Phage- | F | S | — | — | — | — | — | — | — | — | — | — | N | — |
| 593 | | | | | | | | | | | | | | |
| Phage- | N | N | — | V | — | — | R | — | — | — | — | — | I | A |
| 594 | | | | | | | | | | | | | | |
| Phage- | N | S | — | L | — | — | — | — | I | — | — | — | I | D |
| 595 | | | | | | | | | | | | | | |
| Phage- | N | F | — | V | — | — | R | — | — | — | — | — | I | D |
| 596 | | | | | | | | | | | | | | |
| Phage- | H | — | — | — | — | — | R | — | — | — | — | — | T | N |
| 597 | | | | | | | | | | | | | | |
| Phage- | — | I | — | L | — | Y | Q | — | — | L | — | — | I | D |
| 598 | | | | | | | | | | | | | | |
| Phage- | N | F | — | — | — | — | R | — | — | — | — | — | I | D |
| 599 | | | | | | | | | | | | | | |
| Phage- | D | T | — | V | — | — | — | — | — | L | — | — | T | F |
| 600 | | | | | | | | | | | | | | |
| Phage- | Y | S | — | L | — | — | — | — | V | — | — | — | H | I |
| 601 | | | | | | | | | | | | | | |
| Phage- | D | T | — | I | — | — | R | — | — | — | — | — | I | N |
| 602 | | | | | | | | | | | | | | |
| Phage- | A | H | — | L | — | — | — | — | — | W | — | — | S | V |
| 603 | | | | | | | | | | | | | | |
| Phage- | F | S | — | — | — | — | — | — | V | — | — | — | — | S |
| 604 | | | | | | | | | | | | | | |
| Phage- | D | T | — | — | — | — | R | — | — | W | — | — | N | A |
| 605 | | | | | | | | | | | | | | |
| Phage- | D | T | — | V | — | — | R | — | — | F | — | — | P | I |
| 606 | | | | | | | | | | | | | | |
| Phage- | — | D | — | — | — | — | — | — | — | W | — | — | H | D |
| 607 | | | | | | | | | | | | | | |
| Phage- | F | H | — | L | — | — | Q | — | — | — | — | — | H | D |
| 608 | | | | | | | | | | | | | | |
| Phage- | N | S | — | — | — | — | — | — | V | F | — | — | I | V |
| 609 | | | | | | | | | | | | | | |
| Phage- | D | S | — | V | — | — | — | — | — | F | — | — | — | V |
| 610 | | | | | | | | | | | | | | |
| Phage- | Y | — | — | — | — | — | — | — | I | — | — | — | H | V |
| 611 | | | | | | | | | | | | | | |
| Phage- | — | S | — | W | — | — | — | — | — | W | — | Y | H | V |
| 612 | | | | | | | | | | | | | | |
| Phage- | N | — | — | — | — | — | Q | — | I | — | — | — | N | D |
| 613 | | | | | | | | | | | | | | |
| Phage- | Y | S | — | — | — | — | Q | — | — | W | — | — | H | D |
| 614 | | | | | | | | | | | | | | |
| Phage- | F | D | — | — | — | — | R | — | — | — | — | — | N | Y |
| 615 | | | | | | | | | | | | | | |
| Phage- | P | A | — | K | — | — | — | — | — | F | — | — | I | D |
| 616 | | | | | | | | | | | | | | |
| Phage- | F | S | — | — | — | — | — | — | — | — | — | — | N | D |
| 617 | | | | | | | | | | | | | | |
| Phage- | A | S | — | L | — | — | — | — | — | W | — | — | H | V |
| 618 | | | | | | | | | | | | | | |
| Phage- | N | S | — | W | — | — | N | — | — | F | — | — | T | D |
| 619 | | | | | | | | | | | | | | |
| Phage- | T | Y | — | L | — | F | Q | — | — | — | — | — | N | V |
| 620 | | | | | | | | | | | | | | |
| Phage- | F | S | — | — | — | — | Q | — | — | — | — | — | T | — |
| 621 | | | | | | | | | | | | | | |
| Phage- | Y | A | — | — | — | — | Q | — | — | — | — | — | N | — |
| 622 | | | | | | | | | | | | | | |
| Phage- | N | Y | — | V | — | — | N | — | I | H | — | — | I | A |
| 623 | | | | | | | | | | | | | | |
| Phage- | L | S | — | — | — | — | N | — | — | — | — | — | T | A |
| 624 | | | | | | | | | | | | | | |
| Phage- | N | Y | — | I | — | — | — | — | — | — | — | — | I | D |
| 625 | | | | | | | | | | | | | | |
| Phage- | T | T | — | — | — | — | — | — | V | F | — | — | H | V |
| 626 | | | | | | | | | | | | | | |
| Phage- | F | D | — | — | — | — | R | — | — | — | — | — | N | A |
| 627 | | | | | | | | | | | | | | |
| Phage- | D | — | — | — | — | W | R | — | — | W | — | — | N | N |
| 628 | | | | | | | | | | | | | | |
| Phage- | — | T | — | V | — | I | R | — | — | — | — | — | N | D |
| 629 | | | | | | | | | | | | | | |
| Phage- | — | D | — | L | — | Y | — | — | — | — | — | — | N | Y |
| 630 | | | | | | | | | | | | | | |
| Phage- | L | S | — | — | — | — | Q | — | — | — | — | — | H | A |
| 631 | | | | | | | | | | | | | | |
| Phage- | H | Y | — | M | — | W | Q | — | — | W | — | — | T | V |
| 632 | | | | | | | | | | | | | | |
| Phage- | F | H | — | V | — | W | R | — | — | H | — | — | I | D |
| 633 | | | | | | | | | | | | | | |
| Phage- | V | D | — | — | — | W | R | — | — | — | — | — | N | D |
| 634 | | | | | | | | | | | | | | |
| Phage- | T | A | — | V | — | — | R | — | — | — | — | — | H | V |
| 635 | | | | | | | | | | | | | | |
| Phage- | L | S | — | — | — | — | — | — | — | — | — | — | N | D |
| 636 | | | | | | | | | | | | | | |
| Phage- | — | S | — | — | — | — | — | — | — | — | — | — | H | A |
| 637 | | | | | | | | | | | | | | |
| Phage- | D | — | — | I | — | — | H | — | — | F | — | — | T | V |
| 638 | | | | | | | | | | | | | | |
| Phage- | Y | A | — | — | — | — | R | — | — | — | — | — | N | — |
| 639 | | | | | | | | | | | | | | |
| Phage- | A | S | — | — | — | — | — | — | I | — | — | — | T | V |
| 640 | | | | | | | | | | | | | | |
| Phage- | A | D | — | V | — | — | — | — | — | W | — | — | Y | D |
| 641 | | | | | | | | | | | | | | |
| Phage- | N | T | — | — | — | F | — | — | V | F | — | — | N | V |
| 642 | | | | | | | | | | | | | | |
| Phage- | Y | N | — | — | — | L | Q | — | V | — | — | — | T | I |
| 643 | | | | | | | | | | | | | | |
| Phage- | A | T | — | M | — | — | — | — | — | — | — | — | I | N |
| 644 | | | | | | | | | | | | | | |
| Phage- | H | A | — | L | — | — | E | — | I | — | — | — | Y | A |
| 645 | | | | | | | | | | | | | | |
| Phage- | Y | A | — | — | — | — | N | — | I | — | — | — | T | V |
| 646 | | | | | | | | | | | | | | |
| Phage- | N | T | — | — | — | — | — | — | — | — | — | — | I | V |
| 647 | | | | | | | | | | | | | | |
| Phage- | D | T | — | — | — | — | — | — | — | F | — | — | — | V |
| 648 | | | | | | | | | | | | | | |
| Phage- | N | H | — | V | — | — | R | — | — | W | — | — | N | V |
| 649 | | | | | | | | | | | | | | |
| Phage- | A | S | — | — | — | L | Q | — | — | — | — | — | T | A |
| 650 | | | | | | | | | | | | | | |
| Phage- | F | S | — | — | — | F | — | — | — | — | — | — | N | D |
| 651 | | | | | | | | | | | | | | |
| Phage- | A | S | — | M | — | — | R | — | — | — | — | — | N | A |
| 652 | | | | | | | | | | | | | | |
| Phage- | — | H | — | L | — | F | Q | — | — | — | — | — | T | I |
| 653 | | | | | | | | | | | | | | |
| Phage- | F | S | — | — | — | — | Q | — | — | W | — | — | N | D |
| 654 | | | | | | | | | | | | | | |
| Phage- | — | Y | — | — | — | — | R | — | — | — | — | — | N | S |
| 655 | | | | | | | | | | | | | | |
| Phage- | F | S | — | — | — | — | Q | — | V | F | — | — | T | D |
| 656 | | | | | | | | | | | | | | |
| Phage- | N | H | — | L | — | — | — | — | — | W | — | — | — | V |
| 657 | | | | | | | | | | | | | | |
| Phage- | Y | S | — | — | — | — | E | — | — | — | — | — | N | A |
| 658 | | | | | | | | | | | | | | |
| Phage- | — | H | — | V | — | W | H | — | — | — | — | — | N | D |
| 659 | | | | | | | | | | | | | | |
| Phage- | H | S | — | — | — | — | — | — | — | — | — | — | T | S |
| 660 | | | | | | | | | | | | | | |
| Phage- | D | L | — | W | — | F | Q | — | — | — | — | — | H | V |
| 661 | | | | | | | | | | | | | | |
| Phage- | H | D | — | K | — | F | Q | — | — | — | — | — | Y | D |
| 662 | | | | | | | | | | | | | | |
| Phage- | N | T | — | L | — | W | H | — | — | — | — | — | — | D |
| 663 | | | | | | | | | | | | | | |
| Phage- | F | D | — | V | — | — | R | — | — | — | — | — | T | V |
| 664 | | | | | | | | | | | | | | |
| Phage- | A | T | — | — | — | — | — | — | — | — | — | — | I | D |
| 665 | | | | | | | | | | | | | | |
| Phage- | F | A | — | L | — | F | Q | — | V | — | — | — | H | I |
| 666 | | | | | | | | | | | | | | |
| Phage- | — | S | — | — | — | L | Q | — | — | — | — | — | T | D |
| 667 | | | | | | | | | | | | | | |
| Phage- | N | A | — | W | — | — | — | — | — | — | — | — | I | D |
| 668 | | | | | | | | | | | | | | |
| Phage- | F | A | — | — | — | — | — | — | V | — | — | — | T | N |
| 669 | | | | | | | | | | | | | | |
| Phage- | — | D | — | — | — | — | — | — | I | — | — | — | H | F |
| 670 | | | | | | | | | | | | | | |
| Phage- | N | H | — | L | — | F | Q | — | — | W | — | — | T | V |
| 671 | | | | | | | | | | | | | | |
| Phage- | D | S | — | M | — | W | — | — | — | W | — | — | I | D |
| 672 | | | | | | | | | | | | | | |
| Phage- | V | — | — | — | — | W | Q | — | V | — | — | — | H | S |
| 673 | | | | | | | | | | | | | | |
| Phage- | Y | T | — | Q | — | F | H | — | — | — | — | — | H | I |
| 674 | | | | | | | | | | | | | | |
| Phage- | Y | H | — | L | — | — | — | — | — | — | — | — | I | N |
| 675 | | | | | | | | | | | | | | |
| Phage- | Y | F | — | H | — | F | R | — | — | — | — | — | D | — |
| 676 | | | | | | | | | | | | | | |
| Phage- | D | T | — | L | — | — | — | — | — | F | — | — | I | V |
| 677 | | | | | | | | | | | | | | |
| Phage- | T | L | — | H | — | Y | — | — | — | — | — | — | H | D |
| 678 | | | | | | | | | | | | | | |
| Phage- | Y | L | F | C | I | K | N | L | Y | C | W | N | D | G |
| 679 | | | | | | | | | | | | | | |
| Phage- | L | S | — | — | — | F | — | — | — | — | — | — | N | S |
| 680 | | | | | | | | | | | | | | |
| Phage- | Y | S | — | — | — | — | R | — | — | — | — | — | N | D |
| 681 | | | | | | | | | | | | | | |
| Phage- | N | T | — | — | — | — | — | — | I | — | — | — | — | D |
| 682 | | | | | | | | | | | | | | |
| Phage- | D | S | — | — | — | — | M | — | — | — | — | — | T | D |
| 683 | | | | | | | | | | | | | | |
| Phage- | — | S | — | — | — | I | H | — | — | — | — | — | N | D |
| 684 | | | | | | | | | | | | | | |
| Phage- | — | N | — | V | — | — | R | — | — | — | — | — | I | N |
| 685 | | | | | | | | | | | | | | |
| Phage- | N | S | — | — | — | — | Q | — | — | — | — | — | — | D |
| 686 | | | | | | | | | | | | | | |
| Phage- | A | S | — | — | — | — | H | — | — | — | — | — | T | A |
| 687 | | | | | | | | | | | | | | |
| Phage- | F | S | — | V | — | — | — | — | — | W | — | — | T | V |
| 688 | | | | | | | | | | | | | | |
| Phage- | T | D | — | M | — | F | R | — | — | W | — | — | N | — |
| 689 | | | | | | | | | | | | | | |
| Phage- | — | I | — | L | — | F | Q | — | — | — | — | — | T | — |
| 690 | | | | | | | | | | | | | | |
| Phage- | Y | D | — | — | — | — | R | — | — | W | — | — | N | D |
| 691 | | | | | | | | | | | | | | |
| Phage- | — | N | — | M | — | F | R | — | — | — | — | — | L | D |
| 692 | | | | | | | | | | | | | | |
| Phage- | Y | S | — | H | — | — | R | — | — | — | — | — | H | D |
| 693 | | | | | | | | | | | | | | |
| Phage- | H | T | — | — | — | — | R | — | — | — | — | — | H | D |
| 694 | | | | | | | | | | | | | | |
| Phage- | N | I | — | — | — | — | D | — | — | — | — | — | I | D |
| 695 | | | | | | | | | | | | | | |
| Phage- | A | T | — | M | — | — | M | — | V | — | — | — | Y | A |
| 696 | | | | | | | | | | | | | | |
| Phage- | N | A | — | M | — | — | — | — | V | — | — | — | I | N |
| 697 | | | | | | | | | | | | | | |
| Phage- | D | T | — | V | — | L | R | — | — | F | — | — | I | N |
| 698 | | | | | | | | | | | | | | |
| Phage- | Y | A | — | L | — | L | — | — | I | — | — | — | N | I |
| 699 | | | | | | | | | | | | | | |
| Phage- | N | S | — | V | — | — | M | — | I | — | — | — | H | — |
| 700 | | | | | | | | | | | | | | |
| Phage- | N | — | — | — | — | M | D | — | — | W | — | — | I | D |
| 701 | | | | | | | | | | | | | | |
| Phage- | H | N | — | V | — | L | Q | — | — | — | — | — | N | D |
| 702 | | | | | | | | | | | | | | |
| Phage- | N | A | — | M | — | F | — | — | V | — | — | — | I | D |
| 703 | | | | | | | | | | | | | | |
| Phage- | V | F | — | M | — | — | R | — | — | — | — | — | H | D |
| 704 | | | | | | | | | | | | | | |
| Phage- | D | Y | — | V | — | — | R | — | — | — | — | — | I | N |
| 705 | | | | | | | | | | | | | | |
| Phage- | F | S | — | M | — | E | — | — | — | W | — | — | H | V |
| 706 | | | | | | | | | | | | | | |
| Phage- | Y | T | — | — | — | — | N | — | I | — | — | — | T | D |
| 707 | | | | | | | | | | | | | | |
| Phage- | N | F | — | V | — | — | — | — | — | — | — | — | I | D |
| 708 | | | | | | | | | | | | | | |
| Phage- | F | D | — | — | — | — | R | — | — | — | — | — | N | D |
| 709 | | | | | | | | | | | | | | |
| Phage- | H | T | — | — | — | — | R | — | — | — | — | — | T | I |
| 710 | | | | | | | | | | | | | | |
| Phage- | D | — | — | L | — | — | — | — | — | F | — | — | T | V |
| 711 | | | | | | | | | | | | | | |
| Phage- | N | T | — | V | — | F | Q | — | F | F | — | — | I | D |
| 712 | | | | | | | | | | | | | | |
| Phage- | N | S | — | — | — | — | — | — | — | W | — | — | I | A |
| 713 | | | | | | | | | | | | | | |
| Phage- | F | A | — | — | — | — | — | — | — | — | — | — | H | I |
| 714 | | | | | | | | | | | | | | |
| Phage- | D | N | — | — | — | I | R | — | — | — | — | — | I | D |
| 715 | | | | | | | | | | | | | | |
| Phage- | H | S | — | — | — | F | Q | — | — | W | — | — | H | D |
| 716 | | | | | | | | | | | | | | |
| Phage- | — | I | — | W | — | F | Q | — | — | — | — | — | H | V |
| 717 | | | | | | | | | | | | | | |
| Phage- | — | D | — | V | — | — | M | — | I | — | — | F | H | — |
| 718 | | | | | | | | | | | | | | |
| Phage- | D | H | — | V | — | W | R | — | V | — | — | — | H | — |
| 719 | | | | | | | | | | | | | | |
| Phage- | F | S | — | — | — | — | — | — | — | — | — | — | T | D |
| 720 | | | | | | | | | | | | | | |
| Phage- | D | H | — | V | — | — | — | — | — | L | — | — | I | V |
| 721 | | | | | | | | | | | | | | |
| Phage- | N | I | — | L | — | — | — | — | — | — | — | — | N | D |
| 722 | | | | | | | | | | | | | | |
| Phage- | D | Y | — | M | — | — | — | — | — | F | — | — | I | I |
| 723 | | | | | | | | | | | | | | |
| Phage- | N | F | — | V | — | — | — | — | — | — | — | — | I | S |
| 724 | | | | | | | | | | | | | | |
| Phage- | T | H | — | L | — | — | M | — | I | — | — | Y | H | I |
| 725 | | | | | | | | | | | | | | |
| Phage- | Y | T | F | — | — | — | — | — | — | — | — | — | N | D |
| 726 | | | | | | | | | | | | | | |
| Phage- | D | — | — | — | — | — | Q | — | V | — | — | — | H | I |
| 727 | | | | | | | | | | | | | | |
| Phage- | D | L | — | V | — | — | — | — | — | F | — | — | T | V |
| 728 | | | | | | | | | | | | | | |
| Phage- | D | I | — | — | — | F | Q | — | I | — | — | — | H | — |
| 729 | | | | | | | | | | | | | | |
| Phage- | Y | N | — | L | — | — | — | — | I | — | — | — | H | D |
| 730 | | | | | | | | | | | | | | |
| Phage- | N | F | — | V | — | W | — | — | T | L | — | — | I | A |
| 731 | | | | | | | | | | | | | | |
| Phage- | D | S | — | — | — | L | R | — | — | — | — | — | T | A |
| 732 | | | | | | | | | | | | | | |
| Phage- | Y | S | — | M | — | — | — | — | — | — | — | — | N | D |
| 733 | | | | | | | | | | | | | | |
| Phage- | D | S | — | — | — | — | R | — | — | F | — | — | T | — |
| 734 | | | | | | | | | | | | | | |
| Phage- | D | A | — | — | — | I | — | — | — | W | — | — | N | S |
| 735 | | | | | | | | | | | | | | |
| Phage- | N | Y | — | I | — | — | — | — | — | — | — | — | I | N |
| 736 | | | | | | | | | | | | | | |
| Phage- | F | D | — | V | — | — | R | — | — | W | — | — | H | — |
| 737 | | | | | | | | | | | | | | |
| Phage- | Y | D | — | L | — | F | — | — | — | W | — | — | N | — |
| 738 | | | | | | | | | | | | | | |
| Phage- | D | F | — | R | — | — | — | — | — | — | — | — | I | D |
| 739 | | | | | | | | | | | | | | |
| Phage- | N | A | — | V | — | I | — | — | — | W | — | — | H | V |
| 740 | | | | | | | | | | | | | | |
| Phage- | A | A | — | V | — | — | — | — | I | — | — | — | I | H |
| 741 | | | | | | | | | | | | | | |
| Phage- | N | S | — | L | — | — | R | — | — | — | — | — | I | A |
| 742 | | | | | | | | | | | | | | |
| Phage- | N | L | — | — | — | F | Q | — | — | — | — | — | I | D |
| 743 | | | | | | | | | | | | | | |
| Phage- | T | T | — | — | — | — | — | — | — | — | — | — | H | A |
| 744 | | | | | | | | | | | | | | |
| Phage- | D | F | M | V | — | — | — | — | — | F | — | — | I | D |
| 745 | | | | | | | | | | | | | | |
| Phage- | T | S | — | V | — | W | R | — | V | — | — | — | H | D |
| 746 | | | | | | | | | | | | | | |
| Phage- | Y | S | — | — | — | — | — | — | — | — | — | — | N | D |
| 747 | | | | | | | | | | | | | | |
| Phage- | — | Y | — | — | — | F | Q | — | — | — | — | — | N | I |
| 748 | | | | | | | | | | | | | | |
| Phage- | D | T | — | V | — | I | R | — | — | — | — | — | I | D |
| 749 | | | | | | | | | | | | | | |
| Phage- | N | T | — | — | — | — | — | — | — | — | — | — | T | A |
| 750 | | | | | | | | | | | | | | |
| Phage- | N | L | — | — | — | I | N | — | — | F | — | — | N | D |
| 751 | | | | | | | | | | | | | | |
| Phage- | F | S | — | N | — | — | — | — | I | — | — | — | H | — |
| 752 | | | | | | | | | | | | | | |
| Phage- | H | A | — | — | — | — | — | — | — | W | — | — | H | D |
| 753 | | | | | | | | | | | | | | |
| Phage- | N | H | — | V | — | F | Q | — | V | K | — | — | I | A |
| 754 | | | | | | | | | | | | | | |
| Phage- | N | D | — | — | — | — | Q | — | I | W | — | — | H | D |
| 755 | | | | | | | | | | | | | | |
| Phage- | N | D | — | I | — | — | — | — | — | W | — | — | H | — |
| 756 | | | | | | | | | | | | | | |
| Phage- | D | T | — | V | — | — | R | — | — | F | — | — | I | Y |
| 757 | | | | | | | | | | | | | | |
| Phage- | Y | I | — | H | — | F | R | — | — | — | — | — | N | — |
| 758 | | | | | | | | | | | | | | |
| Phage- | H | — | — | L | — | W | R | — | V | — | — | — | H | S |
| 759 | | | | | | | | | | | | | | |
| Phage- | F | A | — | — | — | — | R | — | I | — | — | — | H | A |
| 760 | | | | | | | | | | | | | | |
| Phage- | N | T | — | M | — | — | — | — | I | — | — | — | I | I |
| 761 | | | | | | | | | | | | | | |
| Phage- | Y | S | — | — | — | — | H | — | — | — | — | — | H | V |
| 762 | | | | | | | | | | | | | | |
| Phage- | N | T | — | V | — | — | R | — | — | — | — | — | I | H |
| 763 | | | | | | | | | | | | | | |
| Phage- | N | N | — | — | — | — | — | — | — | — | — | — | T | A |
| 764 | | | | | | | | | | | | | | |
| Phage- | — | D | — | — | — | — | R | — | — | — | — | — | H | Y |
| 765 | | | | | | | | | | | | | | |
| Phage- | H | A | — | — | — | — | — | — | — | — | — | — | T | A |
| 766 | | | | | | | | | | | | | | |
| Phage- | D | T | — | L | — | — | R | — | — | W | — | — | I | D |
| 767 | | | | | | | | | | | | | | |
| Phage- | D | S | — | L | — | — | — | — | — | F | — | — | I | V |
| 768 | | | | | | | | | | | | | | |
| Phage- | D | H | — | V | — | — | R | — | — | F | — | — | I | — |
| 769 | | | | | | | | | | | | | | |
| Phage- | D | T | — | L | — | — | — | — | — | F | — | — | T | Y |
| 770 | | | | | | | | | | | | | | |
| Phage- | D | S | — | — | — | — | — | — | — | F | — | — | P | V |
| 771 | | | | | | | | | | | | | | |
| Phage- | Y | D | — | — | — | W | — | — | — | — | — | — | N | — |
| 772 | | | | | | | | | | | | | | |
| Phage- | N | D | — | — | — | — | R | — | — | — | — | — | N | A |
| 773 | | | | | | | | | | | | | | |
| Phage- | N | I | — | — | — | F | Q | — | — | — | — | — | H | A |
| 774 | | | | | | | | | | | | | | |
| Phage- | — | H | — | L | — | — | — | — | I | F | — | — | T | A |
| 775 | | | | | | | | | | | | | | |
| Phage- | Y | A | — | — | — | L | — | — | — | — | — | — | N | V |
| 776 | | | | | | | | | | | | | | |
| Phage- | N | A | — | M | — | — | — | — | — | — | — | — | I | H |
| 777 | | | | | | | | | | | | | | |
| Phage- | A | N | — | L | — | F | H | — | — | W | — | — | H | D |
| 778 | | | | | | | | | | | | | | |
| Phage- | F | S | — | — | — | — | Q | — | V | — | — | — | T | S |
| 779 | | | | | | | | | | | | | | |
| Phage- | L | H | — | — | — | — | — | — | — | — | — | — | H | A |
| 780 | | | | | | | | | | | | | | |
| Phage- | H | N | — | I | — | — | — | — | — | W | — | — | H | N |
| 781 | | | | | | | | | | | | | | |
| Phage- | N | T | — | V | — | F | N | — | — | — | — | Y | I | D |
| 782 | | | | | | | | | | | | | | |
| Phage- | F | S | — | — | — | — | N | — | — | W | — | — | N | D |
| 783 | | | | | | | | | | | | | | |
| Phage- | — | Y | — | — | — | — | — | — | I | — | — | — | N | F |
| 784 | | | | | | | | | | | | | | |
| Phage- | H | S | — | — | — | — | — | — | — | — | — | — | T | A |
| 785 | | | | | | | | | | | | | | |
| Phage- | L | S | — | — | — | — | R | — | — | — | — | — | T | A |
| 786 | | | | | | | | | | | | | | |
| Phage- | A | A | — | I | — | — | — | — | — | — | — | — | N | — |
| 787 | | | | | | | | | | | | | | |
| Phage- | — | S | — | W | — | F | Q | — | V | — | — | — | — | V |
| 788 | | | | | | | | | | | | | | |
| Phage- | A | — | — | W | — | F | Q | — | V | — | — | — | N | I |
| 789 | | | | | | | | | | | | | | |
| Phage- | N | S | — | — | — | — | R | — | — | — | — | — | I | A |
| 790 | | | | | | | | | | | | | | |
| Phage- | Y | Y | — | N | — | I | — | — | — | — | — | — | T | D |
| 791 | | | | | | | | | | | | | | |
| Phage- | Y | S | — | — | — | L | R | — | — | — | — | — | T | D |
| 792 | | | | | | | | | | | | | | |
| Phage- | F | A | — | — | — | — | N | — | — | — | — | — | T | S |
| 793 | | | | | | | | | | | | | | |
| Phage- | N | F | — | K | — | F | Q | — | V | — | — | — | H | V |
| 794 | | | | | | | | | | | | | | |
| Phage- | D | S | — | M | — | L | R | — | — | F | — | — | T | Y |
| 795 | | | | | | | | | | | | | | |
| Phage- | N | Y | — | V | — | — | — | — | I | — | — | — | I | H |
| 796 | | | | | | | | | | | | | | |
| Phage- | Y | S | — | V | — | — | — | — | — | — | — | — | N | V |
| 797 | | | | | | | | | | | | | | |
| Phage- | — | F | — | W | — | F | Q | — | — | — | — | — | N | D |
| 798 | | | | | | | | | | | | | | |
| Phage- | N | T | — | — | — | — | R | — | — | — | — | — | I | D |
| 799 | | | | | | | | | | | | | | |
| Phage- | D | S | — | R | — | — | N | — | — | — | — | — | I | D |
| 800 | | | | | | | | | | | | | | |
| Phage- | A | D | — | V | — | I | M | — | I | — | — | Y | N | — |
| 801 | | | | | | | | | | | | | | |
| Phage- | N | N | — | V | — | — | — | — | I | — | — | — | I | F |
| 802 | | | | | | | | | | | | | | |
| Phage- | — | D | — | M | — | L | N | — | — | W | — | — | H | — |
| 803 | | | | | | | | | | | | | | |
| Phage- | N | F | — | W | — | — | — | — | — | W | — | — | T | S |
| 804 | | | | | | | | | | | | | | |
| Phage- | Y | L | V | — | — | — | D | K | R | K | — | M | — | L |
| 805 | | | | | | | | | | | | | | |
| Phage- | A | A | — | — | — | W | — | — | — | — | — | — | H | I |
| 806 | | | | | | | | | | | | | | |
| Phage- | D | L | — | L | — | F | R | — | — | W | — | — | H | V |
| 807 | | | | | | | | | | | | | | |
| Phage- | D | — | — | V | — | L | R | — | — | F | — | — | I | D |
| 808 | | | | | | | | | | | | | | |
| Phage- | F | S | — | H | — | — | M | — | — | — | — | — | H | V |
| 809 | | | | | | | | | | | | | | |
| Phage- | N | A | — | I | — | — | — | — | — | W | — | — | N | — |
| 810 | | | | | | | | | | | | | | |
| Phage- | — | D | — | — | — | F | R | — | — | — | — | — | H | D |
| 811 | | | | | | | | | | | | | | |
| Phage- | D | A | — | V | — | — | — | — | — | F | — | — | I | D |
| 812 | | | | | | | | | | | | | | |
| Phage- | N | F | — | M | — | F | H | — | — | — | — | — | I | N |
| 813 | | | | | | | | | | | | | | |
| Phage- | A | S | — | Y | — | — | Q | — | — | F | — | — | H | S |
| 814 | | | | | | | | | | | | | | |
| Phage- | N | S | — | — | — | — | R | — | — | — | — | — | T | D |
| 815 | | | | | | | | | | | | | | |
| Phage- | N | H | — | M | — | I | — | — | — | — | — | — | I | D |
| 816 | | | | | | | | | | | | | | |
| Phage- | N | H | — | — | — | I | N | — | — | — | — | — | H | S |
| 817 | | | | | | | | | | | | | | |
| Phage- | F | S | — | — | — | I | — | — | — | — | — | — | H | — |
| 818 | | | | | | | | | | | | | | |
| Phage- | N | A | — | — | — | M | E | — | — | — | — | — | I | D |
| 819 | | | | | | | | | | | | | | |
| Phage- | — | A | — | — | — | F | Q | — | — | — | — | — | H | F |
| 820 | | | | | | | | | | | | | | |
| Phage- | D | S | — | V | — | — | R | — | — | L | — | — | I | V |
| 821 | | | | | | | | | | | | | | |
| Phage- | L | A | — | — | — | L | Q | — | I | — | — | — | H | S |
| 822 | | | | | | | | | | | | | | |
| Phage- | Y | T | — | M | — | — | — | — | — | — | — | — | H | V |
| 823 | | | | | | | | | | | | | | |
| Phage- | D | T | — | W | — | — | H | — | V | — | — | — | I | I |
| 824 | | | | | | | | | | | | | | |
| Phage- | N | S | — | — | — | — | — | — | I | — | — | — | N | I |
| 825 | | | | | | | | | | | | | | |
| Phage- | N | D | — | L | — | F | R | — | — | W | — | — | Y | D |
| 826 | | | | | | | | | | | | | | |
| Phage- | T | D | — | L | — | F | R | — | — | W | — | — | H | S |
| 827 | | | | | | | | | | | | | | |
| Phage- | N | T | — | L | — | L | N | — | — | F | — | — | I | D |
| 828 | | | | | | | | | | | | | | |
| Phage- | — | H | — | — | — | L | R | — | — | — | — | — | H | V |
| 829 | | | | | | | | | | | | | | |
| Phage- | N | — | — | — | — | F | Q | — | I | — | — | — | N | F |
| 830 | | | | | | | | | | | | | | |
| Phage- | V | H | — | M | — | — | — | — | — | W | — | — | H | A |
| 831 | | | | | | | | | | | | | | |
| Phage- | D | L | — | V | — | — | R | — | — | F | — | — | I | D |
| 832 | | | | | | | | | | | | | | |
| Phage- | N | T | — | L | — | — | — | — | — | — | — | — | I | V |
| 833 | | | | | | | | | | | | | | |
| Phage- | D | T | — | I | — | — | R | — | — | — | — | — | I | D |
| 834 | | | | | | | | | | | | | | |
| Phage- | Y | A | — | — | — | — | R | — | — | — | — | Y | N | A |
| 835 | | | | | | | | | | | | | | |
| Phage- | N | A | — | V | — | F | Q | — | I | — | — | — | I | D |
| 836 | | | | | | | | | | | | | | |
| Phage- | N | A | — | — | — | — | — | — | I | F | — | — | N | S |
| 837 | | | | | | | | | | | | | | |
| Phage- | — | T | — | — | — | W | R | — | — | V | — | — | T | A |
| 838 | | | | | | | | | | | | | | |
| Phage- | N | D | — | L | — | F | Q | — | — | W | — | — | H | A |
| 839 | | | | | | | | | | | | | | |
| Phage- | N | F | — | V | — | — | — | — | F | — | — | — | I | D |
| 840 | | | | | | | | | | | | | | |
| Phage- | — | I | — | M | — | — | — | — | — | W | — | — | I | D |
| 841 | | | | | | | | | | | | | | |
| Phage- | D | H | — | — | — | F | R | — | — | W | — | — | N | I |
| 842 | | | | | | | | | | | | | | |
| Phage- | Y | D | — | I | — | F | R | — | I | W | — | — | N | D |
| 843 | | | | | | | | | | | | | | |
| Phage- | D | A | — | — | — | — | — | — | — | F | — | — | T | Y |
| 844 | | | | | | | | | | | | | | |
| Phage- | N | D | — | I | — | — | — | — | I | — | — | — | H | F |
| 845 | | | | | | | | | | | | | | |
| Phage- | F | S | — | — | — | — | — | — | — | — | — | — | N | A |
| 846 | | | | | | | | | | | | | | |
| Phage- | I | F | A | L | — | W | L | K | — | W | — | L | I | N |
| 847 | | | | | | | | | | | | | | |
| Phage- | D | T | — | — | — | L | R | — | V | L | — | — | T | I |
| 848 | | | | | | | | | | | | | | |
| Phage- | A | T | — | Q | — | F | — | — | I | — | — | — | I | I |
| 849 | | | | | | | | | | | | | | |
| Phage- | H | S | — | — | — | I | — | — | — | W | — | — | N | H |
| 850 | | | | | | | | | | | | | | |
| Phage- | — | A | — | Y | — | F | R | — | V | F | — | — | H | V |
| 851 | | | | | | | | | | | | | | |
| Phage- | D | S | — | V | — | — | — | — | — | L | — | — | I | Y |
| 852 | | | | | | | | | | | | | | |
| Phage- | A | — | — | Y | — | F | Q | — | I | — | — | — | H | I |
| 853 | | | | | | | | | | | | | | |
| Phage- | — | D | — | — | — | W | R | — | — | W | — | — | N | D |
| 854 | | | | | | | | | | | | | | |
| Phage- | A | S | — | — | — | — | — | — | — | — | — | — | T | S |
| 855 | | | | | | | | | | | | | | |
| Phage- | D | A | — | M | — | — | — | — | — | L | — | — | I | V |
| 856 | | | | | | | | | | | | | | |
| Phage- | D | T | — | R | — | — | M | — | I | — | — | — | I | D |
| 857 | | | | | | | | | | | | | | |
| Phage- | D | T | — | — | — | — | — | — | — | F | — | — | T | Y |
| 858 | | | | | | | | | | | | | | |
| Phage- | F | S | — | — | — | — | N | — | V | — | — | — | T | D |
| 859 | | | | | | | | | | | | | | |
| Phage- | N | S | — | M | — | — | M | — | — | — | — | — | T | I |
| 860 | | | | | | | | | | | | | | |
| Phage- | H | I | — | — | — | Q | H | K | R | A | — | Q | I | S |
| 861 | | | | | | | | | | | | | | |
| Phage- | D | H | — | M | — | — | N | — | W | F | — | — | I | N |
| 862 | | | | | | | | | | | | | | |
| Phage- | D | S | — | — | — | F | R | — | — | W | — | — | — | I |
| 863 | | | | | | | | | | | | | | |
| Phage- | — | S | — | M | — | — | R | — | V | — | — | — | I | N |
| 864 | | | | | | | | | | | | | | |
| Phage- | Y | H | — | — | — | — | — | — | I | — | — | — | H | V |
| 865 | | | | | | | | | | | | | | |
| Phage- | D | S | — | — | — | I | R | — | — | F | — | — | T | A |
| 866 | | | | | | | | | | | | | | |
| Phage- | N | T | — | L | — | W | H | — | — | — | — | — | I | N |
| 867 | | | | | | | | | | | | | | |
| Phage- | T | A | — | I | — | — | — | — | — | — | — | — | I | D |
| 868 | | | | | | | | | | | | | | |
| Phage- | F | S | — | L | — | F | Q | — | I | — | — | — | T | V |
| 869 | | | | | | | | | | | | | | |
| Phage- | D | T | — | H | — | — | — | — | I | F | — | — | T | D |
| 870 | | | | | | | | | | | | | | |
| Phage- | N | T | — | V | — | F | — | — | V | H | — | — | I | D |
| 871 | | | | | | | | | | | | | | |
| Phage- | — | N | — | L | — | — | M | — | I | — | — | — | H | V |
| 872 | | | | | | | | | | | | | | |
| Phage- | A | S | — | I | — | — | N | — | — | — | — | — | I | D |
| 873 | | | | | | | | | | | | | | |
| Phage- | N | D | — | V | — | — | — | — | — | W | — | — | N | S |
| 874 | | | | | | | | | | | | | | |
| Phage- | H | F | — | M | — | — | H | — | V | F | — | — | I | S |
| 875 | | | | | | | | | | | | | | |
| Phage- | A | T | P | S | — | — | Q | — | V | Q | — | Y | I | V |
| 876 | | | | | | | | | | | | | | |
| Phage- | T | H | — | — | — | — | R | — | — | — | — | — | H | A |
| 877 | | | | | | | | | | | | | | |
| Phage- | Y | D | — | — | — | I | R | — | I | — | — | — | T | Y |
| 878 | | | | | | | | | | | | | | |
| Phage- | F | D | — | L | — | — | — | — | I | — | — | — | H | D |
| 879 | | | | | | | | | | | | | | |
| Phage- | D | S | — | Y | — | — | — | — | — | F | — | — | T | F |
| 880 | | | | | | | | | | | | | | |
| Phage- | N | H | — | V | — | — | — | — | — | W | — | — | I | Y |
| 881 | | | | | | | | | | | | | | |
| Phage- | N | H | — | V | — | — | R | — | — | — | — | — | I | — |
| 882 | | | | | | | | | | | | | | |
| Phage- | — | F | — | V | — | — | — | — | — | — | — | — | T | D |
| 883 | | | | | | | | | | | | | | |
| Phage- | H | S | — | — | — | — | R | — | — | — | — | — | N | A |
| 884 | | | | | | | | | | | | | | |
| Phage- | N | — | — | Y | — | — | — | — | I | — | — | — | N | S |
| 885 | | | | | | | | | | | | | | |
| Phage- | D | Y | — | — | — | F | Q | — | V | — | — | — | I | A |
| 886 | | | | | | | | | | | | | | |
| Phage- | N | Y | — | — | — | L | R | — | — | — | — | — | T | A |
| 887 | | | | | | | | | | | | | | |
| Phage- | L | S | — | — | — | W | H | — | — | — | — | — | N | I |
| 888 | | | | | | | | | | | | | | |
| Phage- | N | T | — | — | — | F | Q | — | — | — | — | — | I | N |
| 889 | | | | | | | | | | | | | | |
| Phage- | F | S | — | — | — | — | N | — | — | W | — | — | T | D |
| 890 | | | | | | | | | | | | | | |
| Phage- | F | S | — | — | — | L | N | — | — | — | — | — | N | A |
| 891 | | | | | | | | | | | | | | |
| Phage- | Y | S | — | M | — | — | — | — | — | W | — | — | N | D |
| 892 | | | | | | | | | | | | | | |
| Phage- | N | A | — | W | — | — | — | — | V | — | — | — | T | S |
| 893 | | | | | | | | | | | | | | |
| Phage- | N | P | — | Q | — | S | W | K | Y | Q | — | Q | — | F |
| 894 | | | | | | | | | | | | | | |
| Phage- | N | H | — | — | — | — | M | — | I | — | — | — | N | — |
| 895 | | | | | | | | | | | | | | |
| Phage- | N | H | — | H | — | — | M | — | V | — | — | — | I | V |
| 896 | | | | | | | | | | | | | | |
| Phage- | F | D | — | I | — | W | — | — | — | W | — | — | N | D |
| 897 | | | | | | | | | | | | | | |
| Phage- | — | F | — | Q | — | L | M | — | I | — | — | — | H | D |
| 898 | | | | | | | | | | | | | | |
| Phage- | Y | S | — | — | — | L | — | — | — | — | — | — | N | V |
| 899 | | | | | | | | | | | | | | |
| Phage- | N | A | — | — | — | — | R | — | — | — | — | — | T | — |
| 900 | | | | | | | | | | | | | | |
| Phage- | — | D | — | — | — | F | R | — | — | W | — | — | N | S |
| 901 | | | | | | | | | | | | | | |
| Phage- | V | — | — | V | — | L | — | — | — | Q | — | F | D | D |
| 902 | | | | | | | | | | | | | | |
| Phage- | A | D | — | L | — | W | R | — | — | W | — | — | S | A |
| 903 | | | | | | | | | | | | | | |
| Phage- | F | S | — | — | — | — | — | — | I | — | — | — | — | A |
| 904 | | | | | | | | | | | | | | |
| Phage- | D | S | — | — | — | I | — | — | V | F | — | — | T | Y |
| 905 | | | | | | | | | | | | | | |
| Phage- | — | T | — | Y | — | I | — | — | I | W | — | — | N | V |
| 906 | | | | | | | | | | | | | | |
| Phage- | Y | S | — | — | — | — | — | — | V | — | — | — | T | S |
| 907 | | | | | | | | | | | | | | |
| Phage- | N | T | — | I | — | — | R | — | — | — | — | — | — | Y |
| 908 | | | | | | | | | | | | | | |
| Phage- | D | N | — | V | — | — | — | — | — | F | — | — | I | V |
| 909 | | | | | | | | | | | | | | |
| Phage- | D | S | — | W | — | — | R | — | — | — | — | — | I | V |
| 910 | | | | | | | | | | | | | | |
| Phage- | D | Y | — | H | — | — | R | — | — | F | — | — | I | — |
| 911 | | | | | | | | | | | | | | |
| Phage- | H | I | — | S | — | W | H | — | I | — | — | — | Y | D |
| 912 | | | | | | | | | | | | | | |
| Phage- | Y | S | — | — | — | L | R | — | — | — | — | — | N | Y |
| 913 | | | | | | | | | | | | | | |
| Phage- | — | P | Y | L | — | K | Q | K | Q | L | — | G | S | I |
| 914 | | | | | | | | | | | | | | |
| Phage- | F | S | — | — | — | — | — | — | V | — | — | — | T | A |
| 915 | | | | | | | | | | | | | | |
| Phage- | N | A | — | — | — | — | R | — | — | — | — | — | I | S |
| 916 | | | | | | | | | | | | | | |
| Phage- | Y | S | — | — | — | — | — | — | — | W | — | — | N | A |
| 917 | | | | | | | | | | | | | | |
| Phage- | Y | S | — | — | — | — | — | — | — | W | — | — | T | D |
| 918 | | | | | | | | | | | | | | |
| Phage- | N | H | P | Q | — | — | N | K | — | Q | — | — | D | H |
| 919 | | | | | | | | | | | | | | |
| Phage- | H | D | — | — | — | F | R | — | — | W | — | — | T | V |
| 920 | | | | | | | | | | | | | | |
| Phage- | A | Y | — | L | — | — | M | — | — | W | — | T | N | V |
| 921 | | | | | | | | | | | | | | |
| Phage- | Y | A | — | Y | — | F | Q | — | — | W | — | — | H | N |
| 922 | | | | | | | | | | | | | | |
| Phage- | D | H | — | W | — | F | R | — | — | W | — | — | T | I |
| 923 | | | | | | | | | | | | | | |
| Phage- | D | T | — | W | — | — | R | — | — | F | — | — | T | — |
| 924 | | | | | | | | | | | | | | |
| Phage- | H | T | — | W | — | F | R | — | — | — | — | — | N | I |
| 925 | | | | | | | | | | | | | | |
| Phage- | H | S | — | — | — | — | H | — | — | W | — | — | T | I |
| 926 | | | | | | | | | | | | | | |
| Phage- | N | Y | — | L | — | F | H | — | — | — | — | — | I | S |
| 927 | | | | | | | | | | | | | | |
| Phage- | V | — | — | V | — | — | D | H | R | Q | — | — | H | D |
| 928 | | | | | | | | | | | | | | |
| Phage- | N | S | — | — | — | — | N | — | I | — | — | — | N | A |
| 929 | | | | | | | | | | | | | | |
| Phage- | — | H | — | W | — | F | R | — | I | W | — | — | — | — |
| 930 | | | | | | | | | | | | | | |
| Phage- | F | S | — | — | — | — | — | — | — | — | — | — | N | S |
| 931 | | | | | | | | | | | | | | |
| Phage- | L | L | P | V | L | C | Q | E | Y | V | V | C | G | R |
| 932 | | | | | | | | | | | | | | |
| Phage- | — | Y | — | — | — | F | Q | — | V | — | — | — | N | V |
| 933 | | | | | | | | | | | | | | |
| Phage- | H | N | — | L | — | G | Q | K | — | — | — | Y | D | L |
| 934 | | | | | | | | | | | | | | |
| Phage- | D | H | R | Y | — | — | N | D | Q | Q | — | — | — | P |
| 935 | | | | | | | | | | | | | | |
| Phage- | H | A | — | — | — | L | — | — | — | W | — | — | N | I |
| 936 | | | | | | | | | | | | | | |
| Phage- | Y | H | — | — | — | F | R | — | V | — | — | — | H | V |
| 937 | | | | | | | | | | | | | | |
| Phage- | T | F | — | W | — | F | Q | — | V | — | — | — | N | A |
| 938 | | | | | | | | | | | | | | |
| Phage- | F | S | — | — | — | F | Q | — | — | W | — | — | N | S |
| 939 | | | | | | | | | | | | | | |
| Phage- | L | I | — | — | — | — | T | — | — | Q | — | S | I | H |
| 940 | | | | | | | | | | | | | | |
| Phage- | D | Y | — | M | — | L | R | — | V | F | — | — | T | V |
| 941 | | | | | | | | | | | | | | |
| Phage- | D | A | F | Q | — | G | E | R | — | Q | — | — | N | D |
| 942 | | | | | | | | | | | | | | |
| Phage- | H | S | — | — | — | — | R | — | — | W | — | — | T | V |
| 943 | | | | | | | | | | | | | | |
| Phage- | L | D | — | I | — | — | — | — | — | — | — | — | I | N |
| 944 | | | | | | | | | | | | | | |
| Phage- | F | D | — | — | — | R | R | K | — | W | — | P | — | N |
| 945 | | | | | | | | | | | | | | |
| Phage- | Y | T | — | — | — | W | R | — | V | H | — | — | H | I |
| 946 | | | | | | | | | | | | | | |
| Phage- | — | H | — | W | — | F | R | — | — | — | — | — | D | V |
| 947 | | | | | | | | | | | | | | |
| Phage- | D | T | — | — | — | — | R | — | I | — | — | — | H | I |
| 948 | | | | | | | | | | | | | | |
| Phage- | H | N | — | L | — | W | R | — | I | — | — | — | I | D |
| 949 | | | | | | | | | | | | | | |
| Phage- | D | I | — | — | — | L | R | — | V | F | — | — | T | A |
| 950 | | | | | | | | | | | | | | |
| Phage- | P | — | V | L | — | L | H | K | H | Q | — | L | S | Y |
| 951 | | | | | | | | | | | | | | |
| Phage- | N | I | — | L | — | — | N | K | M | Q | — | F | Y | H |
| 952 | | | | | | | | | | | | | | |
| Phage- | A | D | — | W | — | — | R | — | — | — | — | — | I | I |
| 953 | | | | | | | | | | | | | | |
| Phage- | H | — | — | — | — | W | H | — | V | — | — | — | H | — |
| 954 | | | | | | | | | | | | | | |
| Phage- | A | F | — | M | — | W | H | — | — | — | — | — | H | — |
| 955 | | | | | | | | | | | | | | |
| Phage- | V | I | — | L | — | S | D | Q | — | — | — | K | D | — |
| 956 | | | | | | | | | | | | | | |
| Phage- | V | Y | — | — | — | — | Q | E | — | K | — | — | F | S |
| 957 | | | | | | | | | | | | | | |
| Phage- | I | H | — | W | — | F | R | — | V | — | — | — | H | V |
| 958 | | | | | | | | | | | | | | |
| Phage- | D | I | — | — | — | W | R | — | — | — | — | — | T | S |
| 959 | | | | | | | | | | | | | | |
| Phage- | F | D | — | — | — | — | R | — | — | W | — | — | N | A |
| 960 | | | | | | | | | | | | | | |
| Phage- | Y | S | — | — | — | — | — | — | — | W | — | — | N | V |
| 961 | | | | | | | | | | | | | | |
| Phage- | N | Y | — | W | — | W | — | — | — | — | — | — | T | D |
| 962 | | | | | | | | | | | | | | |
| Phage- | Y | — | — | H | — | W | H | — | — | — | — | — | N | — |
| 963 | | | | | | | | | | | | | | |
| Phage- | D | — | S | — | — | Q | Q | K | — | Q | — | S | Y | D |
| 964 | | | | | | | | | | | | | | |
| Phage- | N | D | — | V | — | W | R | — | I | — | — | — | I | Y |
| 965 | | | | | | | | | | | | | | |
| Phage- | N | T | V | P | — | A | M | — | — | W | — | R | D | F |
| 966 | | | | | | | | | | | | | | |
| Phage- | — | H | F | — | — | W | R | — | — | — | — | — | N | D |
| 967 | | | | | | | | | | | | | | |
| Phage- | D | F | — | — | — | L | R | — | V | F | — | — | T | A |
| 968 | | | | | | | | | | | | | | |
| Phage- | N | D | — | — | — | — | Q | — | — | — | — | — | H | — |
| 969 | | | | | | | | | | | | | | |
| Phage- | D | A | — | — | — | F | R | — | — | W | — | — | N | L |
| 970 | | | | | | | | | | | | | | |
| Phage- | Y | N | — | V | — | F | Q | — | I | F | — | — | H | D |
| 971 | | | | | | | | | | | | | | |
| Phage- | V | P | — | — | — | — | L | K | I | F | — | G | H | N |
| 972 | | | | | | | | | | | | | | |
| Phage- | Y | S | — | — | — | — | H | — | — | — | — | — | N | A |
| 973 | | | | | | | | | | | | | | |
| Phage- | T | N | — | — | — | G | — | S | — | Q | — | R | N | I |
| 974 | | | | | | | | | | | | | | |
| Phage- | H | I | V | — | — | — | N | Y | — | Q | — | G | H | F |
| 975 | | | | | | | | | | | | | | |
| Phage- | N | H | — | L | — | A | S | Q | F | Q | — | — | N | A |
| 976 | | | | | | | | | | | | | | |
| Phage- | F | I | — | — | — | G | Q | H | — | Q | — | L | D | A |
| 977 | | | | | | | | | | | | | | |
| Phage- | A | D | — | L | — | F | R | — | — | W | — | — | H | N |
| 978 | | | | | | | | | | | | | | |
| Phage- | T | T | — | W | — | Y | R | — | V | — | — | — | N | I |
| 979 | | | | | | | | | | | | | | |
| Phage- | D | S | — | W | — | L | — | — | — | V | — | Q | S | N |
| 980 | | | | | | | | | | | | | | |

| | Phage binding ELISA | | | |
|---|---|---|---|---|
| | | | TROP2 Fab | |
| | | TROP2 | signal in | |
| | Backgroud | Fab | presence of | SEQ |
| | signal | signal | TROP2 | ID NO. |
| Phage-1 | 0.091 | 1.227 | 0.085 | 23 |
| Phage-2 | 0.072 | 2.622 | 0.125 | 159 |
| Phage-3 | 0.110 | 2.763 | 0.142 | 160 |
| Phage-4 | 0.073 | 2.739 | 0.215 | 161 |
| Phage-5 | 0.083 | 2.746 | 0.343 | 162 |
| Phage-6 | 0.067 | 2.512 | 0.167 | 163 |
| Phage-7 | 0.077 | 2.742 | 0.451 | 164 |
| Phage-8 | 0.078 | 2.729 | 0.339 | 165 |
| Phage-9 | 0.072 | 2.761 | 0.289 | 166 |
| Phage- | 0.114 | 2.798 | 0.086 | 167 |
| 10 | | | | |
| Phage- | 0.098 | 2.717 | 0.173 | 168 |
| 11 | | | | |
| Phage- | 0.097 | 2.737 | 0.221 | 169 |
| 12 | | | | |
| Phage- | 0.135 | 2.713 | 0.168 | 170 |
| 13 | | | | |
| Phage- | 0.102 | 2.737 | 0.327 | 171 |
| 14 | | | | |
| Phage- | 0.122 | 2.694 | 0.161 | 172 |
| 15 | | | | |
| Phage- | 0.089 | 2.674 | 0.186 | 173 |
| 16 | | | | |
| Phage- | 0.072 | 2.704 | 0.283 | 174 |
| 17 | | | | |
| Phage- | 0.184 | 2.820 | 0.379 | 175 |
| 18 | | | | |
| Phage- | 0.071 | 2.710 | 0.237 | 176 |
| 19 | | | | |
| Phage- | 0.082 | 2.784 | 0.344 | 177 |
| 20 | | | | |
| Phage- | 0.122 | 2.711 | 0.134 | 178 |
| 21 | | | | |
| Phage- | 0.221 | 2.717 | 0.247 | 244 |
| 22 | | | | |
| Phage- | 0.112 | 2.714 | 0.296 | 245 |
| 23 | | | | |
| Phage- | 0.081 | 2.721 | 0.258 | 246 |
| 24 | | | | |
| Phage- | 0.178 | 2.728 | 0.211 | 247 |
| 25 | | | | |
| Phage- | 0.067 | 2.814 | 0.156 | 248 |
| 26 | | | | |
| Phage- | 0.089 | 2.824 | 0.083 | 249 |
| 27 | | | | |
| Phage- | 0.142 | 2.777 | 0.134 | 250 |
| 28 | | | | |
| Phage- | 0.541 | 2.760 | 0.419 | 251 |
| 29 | | | | |
| Phage- | 0.293 | 2.748 | 0.225 | 252 |
| 30 | | | | |
| Phage- | 0.269 | 2.747 | 0.265 | 253 |
| 31 | | | | |
| Phage- | 0.219 | 2.744 | 0.143 | 254 |
| 32 | | | | |
| Phage- | 0.104 | 2.742 | 0.087 | 255 |
| 33 | | | | |
| Phage- | 0.191 | 2.740 | 0.138 | 256 |
| 34 | | | | |
| Phage- | 0.078 | 2.739 | 0.078 | 257 |
| 35 | | | | |
| Phage- | 0.239 | 2.739 | 0.194 | 258 |
| 36 | | | | |
| Phage- | 0.106 | 2.738 | 0.104 | 259 |
| 37 | | | | |
| Phage- | 0.257 | 2.738 | 0.228 | 260 |
| 38 | | | | |
| Phage- | 0.204 | 2.736 | 0.137 | 261 |
| 39 | | | | |
| Phage- | 0.317 | 2.736 | 0.166 | 262 |
| 40 | | | | |
| Phage- | 0.171 | 2.735 | 0.148 | 263 |
| 41 | | | | |
| Phage- | 0.383 | 2.735 | 0.324 | 264 |
| 42 | | | | |
| Phage- | 0.207 | 2.731 | 0.200 | 265 |
| 43 | | | | |
| Phage- | 0.183 | 2.729 | 0.144 | 266 |
| 44 | | | | |
| Phage- | 0.236 | 2.728 | 0.216 | 267 |
| 45 | | | | |
| Phage- | 0.349 | 2.728 | 0.306 | 268 |
| 46 | | | | |
| Phage- | 0.151 | 2.726 | 0.137 | 269 |
| 47 | | | | |
| Phage- | 0.269 | 2.724 | 0.111 | 270 |
| 48 | | | | |
| Phage- | 0.375 | 2.724 | 0.357 | 271 |
| 49 | | | | |
| Phage- | 0.231 | 2.723 | 0.218 | 272 |
| 50 | | | | |
| Phage- | 0.611 | 2.722 | 0.297 | 273 |
| 51 | | | | |
| Phage- | 0.159 | 2.722 | 0.136 | 274 |
| 52 | | | | |
| Phage- | 0.169 | 2.722 | 0.147 | 275 |
| 53 | | | | |
| Phage- | 0.329 | 2.721 | 0.128 | 276 |
| 54 | | | | |
| Phage- | 0.181 | 2.721 | 0.108 | 277 |
| 55 | | | | |
| Phage- | 0.297 | 2.719 | 0.169 | 278 |
| 56 | | | | |
| Phage- | 0.379 | 2.719 | 0.167 | 279 |
| 57 | | | | |
| Phage- | 2.696 | 2.719 | 2.689 | 280 |
| 58 | | | | |
| Phage- | 0.225 | 2.718 | 0.216 | 281 |
| 59 | | | | |
| Phage- | 0.321 | 2.716 | 0.319 | 282 |
| 60 | | | | |
| Phage- | 0.215 | 2.714 | 0.195 | 283 |
| 61 | | | | |
| Phage- | 0.338 | 2.713 | 0.208 | 284 |
| 62 | | | | |
| Phage- | 0.392 | 2.712 | 0.270 | 285 |
| 63 | | | | |
| Phage- | 0.223 | 2.711 | 0.168 | 286 |
| 64 | | | | |
| Phage- | 0.566 | 2.711 | 0.556 | 287 |
| 65 | | | | |
| Phage- | 0.470 | 2.711 | 0.208 | 288 |
| 66 | | | | |
| Phage- | 0.342 | 2.710 | 0.310 | 289 |
| 67 | | | | |
| Phage- | 0.267 | 2.710 | 0.133 | 290 |
| 68 | | | | |
| Phage- | 0.313 | 2.709 | 0.226 | 291 |
| 69 | | | | |
| Phage- | 0.301 | 2.706 | 0.159 | 292 |
| 70 | | | | |
| Phage- | 0.264 | 2.705 | 0.093 | 293 |
| 71 | | | | |
| Phage- | 0.444 | 2.704 | 0.418 | 294 |
| 72 | | | | |
| Phage- | 0.245 | 2.702 | 0.122 | 295 |
| 73 | | | | |
| Phage- | 0.456 | 2.702 | 0.313 | 296 |
| 74 | | | | |
| Phage- | 0.329 | 2.701 | 0.287 | 297 |
| 75 | | | | |
| Phage- | 0.337 | 2.701 | 0.214 | 298 |
| 76 | | | | |
| Phage- | 0.358 | 2.701 | 0.222 | 299 |
| 77 | | | | |
| Phage- | 0.133 | 2.699 | 0.123 | 300 |
| 78 | | | | |
| Phage- | 0.246 | 2.697 | 0.138 | 301 |
| 79 | | | | |
| Phage- | 0.220 | 2.694 | 0.196 | 302 |
| 80 | | | | |
| Phage- | 0.349 | 2.693 | 0.130 | 303 |
| 81 | | | | |
| Phage- | 0.234 | 2.691 | 0.135 | 304 |
| 82 | | | | |
| Phage- | 0.316 | 2.691 | 0.167 | 305 |
| 83 | | | | |
| Phage- | 0.324 | 2.687 | 0.202 | 306 |
| 84 | | | | |
| Phage- | 0.145 | 2.681 | 0.136 | 307 |
| 85 | | | | |
| Phage- | 0.138 | 2.674 | 0.138 | 308 |
| 86 | | | | |
| Phage- | 0.343 | 2.672 | 0.204 | 309 |
| 87 | | | | |
| Phage- | 0.185 | 2.672 | 0.082 | 310 |
| 88 | | | | |
| Phage- | 0.180 | 2.666 | 0.155 | 311 |
| 89 | | | | |
| Phage- | 0.132 | 2.664 | 0.119 | 312 |
| 90 | | | | |
| Phage- | 0.200 | 2.657 | 0.195 | 313 |
| 91 | | | | |
| Phage- | 0.247 | 2.655 | 0.149 | 314 |
| 92 | | | | |
| Phage- | 0.204 | 2.652 | 0.136 | 315 |
| 93 | | | | |
| Phage- | 0.235 | 2.631 | 0.195 | 316 |
| 94 | | | | |
| Phage- | 0.160 | 2.626 | 0.153 | 317 |
| 95 | | | | |
| Phage- | 0.178 | 2.623 | 0.160 | 318 |
| 96 | | | | |
| Phage- | 0.177 | 2.621 | 0.111 | 319 |
| 97 | | | | |
| Phage- | 0.145 | 2.594 | 0.131 | 320 |
| 98 | | | | |
| Phage- | 0.341 | 2.593 | 0.148 | 321 |
| 99 | | | | |
| Phage- | 0.347 | 2.577 | 0.171 | 322 |
| 100 | | | | |
| Phage- | 0.259 | 2.540 | 0.226 | 323 |
| 101 | | | | |
| Phage- | 0.162 | 2.538 | 0.124 | 324 |
| 102 | | | | |
| Phage- | 0.338 | 2.487 | 0.173 | 325 |
| 103 | | | | |
| Phage- | 0.087 | 2.479 | 0.074 | 326 |
| 104 | | | | |
| Phage- | 0.296 | 2.437 | 0.263 | 327 |
| 105 | | | | |
| Phage- | 0.266 | 2.413 | 0.163 | 328 |
| 106 | | | | |
| Phage- | 0.193 | 2.313 | 0.139 | 329 |
| 107 | | | | |
| Phage- | 0.140 | 2.290 | 0.128 | 330 |
| 108 | | | | |
| Phage- | 0.091 | 2.217 | 0.078 | 331 |
| 109 | | | | |
| Phage- | 0.167 | 2.036 | 0.162 | 332 |
| 110 | | | | |
| Phage- | 0.089 | 2.029 | 0.083 | 333 |
| 111 | | | | |
| Phage- | 0.372 | 2.011 | 0.154 | 334 |
| 112 | | | | |
| Phage- | 0.290 | 2.001 | 0.266 | 335 |
| 113 | | | | |
| Phage- | 0.191 | 1.935 | 0.143 | 336 |
| 114 | | | | |
| Phage- | 0.215 | 1.805 | 0.172 | 337 |
| 115 | | | | |
| Phage- | 0.234 | 1.730 | 0.120 | 338 |
| 116 | | | | |
| Phage- | 0.174 | 1.648 | 0.110 | 339 |
| 117 | | | | |
| Phage- | 0.124 | 1.475 | 0.118 | 340 |
| 118 | | | | |
| Phage- | 0.203 | 1.442 | 0.070 | 341 |
| 119 | | | | |
| Phage- | 0.183 | 1.441 | 0.134 | 342 |
| 120 | | | | |
| Phage- | 0.150 | 1.332 | 0.132 | 343 |
| 121 | | | | |
| Phage- | 0.150 | 0.814 | 0.148 | 344 |
| 122 | | | | |
| Phage- | 0.107 | 0.698 | 0.099 | 345 |
| 123 | | | | |
| Phage- | 0.084 | 0.636 | 0.078 | 346 |
| 124 | | | | |
| Phage- | 0.182 | 0.508 | 0.064 | 347 |
| 125 | | | | |
| Phage- | 0.185 | 0.488 | 0.131 | 348 |
| 126 | | | | |
| Phage- | 0.110 | 0.480 | 0.108 | 349 |
| 127 | | | | |
| Phage- | 0.196 | 0.302 | 0.153 | 350 |
| 128 | | | | |
| Phage- | 0.126 | 0.194 | 0.095 | 351 |
| 129 | | | | |
| Phage- | 0.146 | 0.143 | 0.166 | 352 |
| 130 | | | | |
| Phage- | 0.166 | 0.105 | 2.655 | 353 |
| 131 | | | | |
| Phage- | 0.268 | 0.099 | 2.674 | 354 |
| 132 | | | | |
| Phage- | 0.117 | 0.098 | 0.125 | 355 |
| 133 | | | | |
| Phage- | 0.113 | 0.095 | 0.134 | 356 |
| 134 | | | | |
| Phage- | 0.234 | 0.090 | 2.682 | 357 |
| 135 | | | | |
| Phage- | 0.113 | 0.089 | 2.695 | 358 |
| 136 | | | | |
| Phage- | 0.097 | 0.088 | 0.099 | 359 |
| 137 | | | | |
| Phage- | 0.082 | 0.088 | 0.073 | 360 |
| 138 | | | | |
| Phage- | 0.087 | 0.085 | 0.095 | 361 |
| 139 | | | | |
| Phage- | 0.087 | 0.084 | 2.843 | 362 |
| 140 | | | | |
| Phage- | 0.094 | 0.083 | 0.100 | 363 |
| 141 | | | | |
| Phage- | 0.121 | 0.082 | 0.133 | 364 |
| 142 | | | | |
| Phage- | 0.087 | 0.078 | 0.138 | 365 |
| 143 | | | | |
| Phage- | 0.092 | 0.077 | 0.098 | 366 |
| 144 | | | | |
| Phage- | 0.083 | 0.077 | 0.092 | 367 |
| 145 | | | | |
| Phage- | 0.090 | 0.076 | 0.111 | 368 |
| 146 | | | | |
| Phage- | 0.098 | 0.076 | 0.101 | 369 |
| 147 | | | | |
| Phage- | 0.090 | 0.076 | 0.109 | 370 |
| 148 | | | | |
| Phage- | 0.070 | 0.075 | 0.069 | 371 |
| 149 | | | | |
| Phage- | 0.079 | 0.075 | 0.088 | 372 |
| 150 | | | | |
| Phage- | 0.081 | 0.075 | 0.112 | 373 |
| 151 | | | | |
| Phage- | 0.083 | 0.075 | 0.092 | 374 |
| 152 | | | | |
| Phage- | 0.138 | 0.073 | 0.252 | 375 |
| 153 | | | | |
| Phage- | 0.096 | 0.073 | 0.098 | 376 |
| 154 | | | | |
| Phage- | 0.119 | 0.072 | 0.280 | 377 |
| 155 | | | | |
| Phage- | 0.074 | 0.072 | 0.149 | 378 |
| 156 | | | | |
| Phage- | 0.078 | 0.072 | 0.113 | 379 |
| 157 | | | | |
| Phage- | 0.081 | 0.071 | 0.136 | 380 |
| 158 | | | | |
| Phage- | 0.077 | 0.070 | 0.087 | 381 |
| 159 | | | | |
| Phage- | 0.089 | 0.070 | 0.110 | 382 |
| 160 | | | | |
| Phage- | 0.085 | 0.070 | 0.107 | 383 |
| 161 | | | | |
| Phage- | 0.083 | 0.069 | 0.191 | 384 |
| 162 | | | | |
| Phage- | 0.085 | 0.069 | 0.089 | 385 |
| 163 | | | | |
| Phage- | 0.094 | 0.068 | 0.124 | 386 |
| 164 | | | | |
| Phage- | 0.084 | 0.068 | 2.688 | 387 |
| 165 | | | | |
| Phage- | 0.229 | 0.067 | 2.668 | 388 |
| 166 | | | | |
| Phage- | 0.070 | 0.067 | 0.389 | 389 |
| 167 | | | | |
| Phage- | 0.073 | 0.066 | 0.089 | 390 |
| 168 | | | | |
| Phage- | 0.084 | 0.065 | 0.130 | 391 |
| 169 | | | | |
| Phage- | 0.082 | 0.064 | 0.150 | 392 |
| 170 | | | | |
| Phage- | 0.065 | 0.064 | 0.212 | 393 |
| 171 | | | | |
| Phage- | 0.141 | 0.063 | 0.371 | 394 |
| 172 | | | | |
| Phage- | 0.096 | 0.062 | 0.110 | 395 |
| 173 | | | | |
| Phage- | 0.072 | 0.062 | 0.086 | 396 |
| 174 | | | | |
| Phage- | 0.185 | 0.062 | 0.251 | 397 |
| 175 | | | | |
| Phage- | 0.167 | 0.061 | 0.308 | 398 |
| 176 | | | | |
| Phage- | 0.066 | 0.061 | 0.181 | 399 |
| 177 | | | | |
| Phage- | 0.186 | 0.061 | 0.403 | 400 |
| 178 | | | | |
| Phage- | 0.067 | 0.061 | 0.149 | 401 |
| 179 | | | | |
| Phage- | 0.074 | 0.057 | 0.082 | 402 |
| 180 | | | | |
| Phage- | 0.169 | 2.685 | 0.169 | 403 |
| 181 | | | | |
| Phage- | 0.096 | 2.715 | 0.097 | 404 |
| 182 | | | | |
| Phage- | 0.110 | 2.671 | 0.111 | 405 |
| 183 | | | | |
| Phage- | 0.150 | 2.408 | 0.151 | 406 |
| 184 | | | | |
| Phage- | 0.150 | 2.515 | 0.151 | 407 |
| 185 | | | | |
| Phage- | 0.234 | 2.711 | 0.236 | 408 |
| 186 | | | | |
| Phage- | 0.379 | 2.712 | 0.381 | 409 |
| 187 | | | | |
| Phage- | 0.131 | 2.710 | 0.134 | 410 |
| 188 | | | | |
| Phage- | 0.093 | 2.697 | 0.097 | 411 |
| 189 | | | | |
| Phage- | 0.146 | 2.601 | 0.150 | 412 |
| 190 | | | | |
| Phage- | 0.144 | 2.565 | 0.149 | 413 |
| 191 | | | | |
| Phage- | 0.170 | 2.513 | 0.175 | 414 |
| 192 | | | | |
| Phage- | 0.212 | 2.706 | 0.218 | 415 |
| 193 | | | | |
| Phage- | 0.118 | 2.054 | 0.124 | 416 |
| 194 | | | | |
| Phage- | 0.202 | 2.626 | 0.209 | 417 |
| 195 | | | | |
| Phage- | 0.104 | 2.786 | 0.113 | 418 |
| 196 | | | | |
| Phage- | 0.148 | 2.745 | 0.157 | 419 |
| 197 | | | | |
| Phage- | 0.182 | 2.701 | 0.191 | 420 |
| 198 | | | | |
| Phage- | 0.076 | 1.157 | 0.079 | 421 |
| 199 | | | | |
| Phage- | 0.080 | 2.690 | 0.089 | 422 |
| 200 | | | | |
| Phage- | 0.142 | 1.423 | 0.147 | 423 |
| 201 | | | | |
| Phage- | 0.086 | 2.755 | 0.098 | 424 |
| 202 | | | | |
| Phage- | 0.062 | 2.685 | 0.075 | 425 |
| 203 | | | | |
| Phage- | 0.070 | 2.639 | 0.083 | 426 |
| 204 | | | | |
| Phage- | 0.163 | 2.636 | 0.175 | 427 |
| 205 | | | | |
| Phage- | 0.088 | 2.686 | 0.102 | 428 |
| 206 | | | | |
| Phage- | 0.076 | 2.729 | 0.090 | 429 |
| 207 | | | | |
| Phage- | 0.093 | 2.754 | 0.109 | 430 |
| 208 | | | | |
| Phage- | 0.099 | 2.013 | 0.110 | 431 |
| 209 | | | | |
| Phage- | 0.144 | 2.664 | 0.159 | 432 |
| 210 | | | | |
| Phage- | 0.167 | 2.511 | 0.182 | 433 |
| 211 | | | | |
| Phage- | 0.104 | 2.774 | 0.121 | 434 |
| 212 | | | | |
| Phage- | 0.132 | 2.746 | 0.148 | 435 |
| 213 | | | | |
| Phage- | 0.095 | 2.597 | 0.112 | 436 |
| 214 | | | | |
| Phage- | 0.252 | 2.703 | 0.269 | 437 |
| 215 | | | | |
| Phage- | 0.091 | 2.822 | 0.110 | 438 |
| 216 | | | | |
| Phage- | 0.204 | 2.710 | 0.222 | 439 |
| 217 | | | | |
| Phage- | 0.210 | 2.711 | 0.228 | 440 |
| 218 | | | | |
| Phage- | 0.108 | 2.666 | 0.128 | 441 |
| 219 | | | | |
| Phage- | 0.150 | 2.461 | 0.168 | 442 |
| 220 | | | | |
| Phage- | 0.130 | 2.710 | 0.152 | 443 |
| 221 | | | | |
| Phage- | 0.077 | 1.498 | 0.089 | 444 |
| 222 | | | | |
| Phage- | 0.104 | 2.740 | 0.128 | 445 |
| 223 | | | | |
| Phage- | 0.087 | 2.805 | 0.112 | 446 |
| 224 | | | | |
| Phage- | 0.073 | 0.666 | 0.078 | 447 |
| 225 | | | | |
| Phage- | 0.096 | 2.436 | 0.118 | 448 |
| 226 | | | | |
| Phage- | 0.117 | 2.752 | 0.141 | 449 |
| 227 | | | | |
| Phage- | 0.067 | 2.324 | 0.088 | 450 |
| 228 | | | | |
| Phage- | 0.104 | 2.050 | 0.123 | 451 |
| 229 | | | | |
| Phage- | 0.154 | 2.810 | 0.180 | 452 |
| 230 | | | | |
| Phage- | 0.078 | 2.368 | 0.101 | 453 |
| 231 | | | | |
| Phage- | 0.075 | 1.658 | 0.091 | 454 |
| 232 | | | | |
| Phage- | 0.176 | 2.738 | 0.203 | 455 |
| 233 | | | | |
| Phage- | 0.072 | 2.693 | 0.099 | 456 |
| 234 | | | | |
| Phage- | 0.125 | 2.662 | 0.151 | 457 |
| 235 | | | | |
| Phage- | 0.073 | 2.358 | 0.097 | 458 |
| 236 | | | | |
| Phage- | 0.082 | 2.397 | 0.107 | 459 |
| 237 | | | | |
| Phage- | 0.070 | 2.653 | 0.099 | 460 |
| 238 | | | | |
| Phage- | 0.308 | 2.740 | 0.335 | 461 |
| 239 | | | | |
| Phage- | 0.138 | 1.860 | 0.157 | 462 |
| 240 | | | | |
| Phage- | 0.123 | 2.555 | 0.150 | 463 |
| 241 | | | | |
| Phage- | 0.076 | 2.684 | 0.106 | 464 |
| 242 | | | | |
| Phage- | 0.108 | 2.754 | 0.138 | 465 |
| 243 | | | | |
| Phage- | 0.193 | 2.682 | 0.221 | 466 |
| 244 | | | | |
| Phage- | 0.069 | 2.800 | 0.100 | 467 |
| 245 | | | | |
| Phage- | 0.113 | 2.714 | 0.143 | 468 |
| 246 | | | | |
| Phage- | 0.074 | 2.545 | 0.104 | 469 |
| 247 | | | | |
| Phage- | 0.093 | 2.604 | 0.124 | 470 |
| 248 | | | | |
| Phage- | 0.067 | 1.762 | 0.088 | 471 |
| 249 | | | | |
| Phage- | 0.065 | 2.686 | 0.098 | 472 |
| 250 | | | | |
| Phage- | 0.139 | 2.622 | 0.172 | 473 |
| 251 | | | | |
| Phage- | 0.109 | 2.726 | 0.144 | 474 |
| 252 | | | | |
| Phage- | 0.064 | 2.613 | 0.098 | 475 |
| 253 | | | | |
| Phage- | 0.099 | 2.741 | 0.136 | 476 |
| 254 | | | | |
| Phage- | 0.112 | 2.752 | 0.148 | 477 |
| 255 | | | | |
| Phage- | 0.162 | 2.736 | 0.198 | 478 |
| 256 | | | | |
| Phage- | 0.079 | 2.728 | 0.116 | 479 |
| 257 | | | | |
| Phage- | 0.084 | 2.748 | 0.121 | 480 |
| 258 | | | | |
| Phage- | 0.096 | 2.728 | 0.133 | 481 |
| 259 | | | | |
| Phage- | 0.155 | 2.705 | 0.191 | 482 |
| 260 | | | | |
| Phage- | 0.092 | 1.982 | 0.120 | 483 |
| 261 | | | | |
| Phage- | 0.090 | 2.775 | 0.131 | 484 |
| 262 | | | | |
| Phage- | 0.230 | 2.723 | 0.268 | 485 |
| 263 | | | | |
| Phage- | 0.088 | 2.711 | 0.128 | 486 |
| 264 | | | | |
| Phage- | 0.075 | 2.310 | 0.109 | 487 |
| 265 | | | | |
| Phage- | 0.137 | 2.694 | 0.177 | 488 |
| 266 | | | | |
| Phage- | 0.084 | 2.838 | 0.126 | 489 |
| 267 | | | | |
| Phage- | 0.090 | 2.491 | 0.127 | 490 |
| 268 | | | | |
| Phage- | 0.069 | 2.623 | 0.110 | 491 |
| 269 | | | | |
| Phage- | 0.087 | 2.876 | 0.131 | 492 |
| 270 | | | | |
| Phage- | 0.091 | 2.720 | 0.134 | 493 |
| 271 | | | | |
| Phage- | 0.091 | 2.761 | 0.135 | 494 |
| 272 | | | | |
| Phage- | 0.076 | 2.753 | 0.120 | 495 |
| 273 | | | | |
| Phage- | 0.085 | 2.789 | 0.129 | 496 |
| 274 | | | | |
| Phage- | 0.233 | 2.697 | 0.274 | 497 |
| 275 | | | | |
| Phage- | 0.091 | 2.829 | 0.137 | 498 |
| 276 | | | | |
| Phage- | 0.155 | 2.612 | 0.197 | 499 |
| 277 | | | | |
| Phage- | 0.165 | 2.656 | 0.208 | 500 |
| 278 | | | | |
| Phage- | 0.091 | 2.666 | 0.135 | 501 |
| 279 | | | | |
| Phage- | 0.091 | 2.728 | 0.137 | 502 |
| 280 | | | | |
| Phage- | 0.121 | 2.687 | 0.165 | 503 |
| 281 | | | | |
| Phage- | 0.170 | 2.409 | 0.209 | 504 |
| 282 | | | | |
| Phage- | 0.329 | 2.719 | 0.371 | 505 |
| 283 | | | | |
| Phage- | 0.099 | 2.722 | 0.145 | 506 |
| 284 | | | | |
| Phage- | 0.393 | 2.723 | 0.434 | 507 |
| 285 | | | | |
| Phage- | 0.103 | 2.637 | 0.148 | 508 |
| 286 | | | | |
| Phage- | 0.084 | 2.710 | 0.131 | 509 |
| 287 | | | | |
| Phage- | 0.068 | 2.707 | 0.116 | 510 |
| 288 | | | | |
| Phage- | 0.087 | 2.710 | 0.135 | 511 |
| 289 | | | | |
| Phage- | 0.266 | 1.816 | 0.294 | 512 |
| 290 | | | | |
| Phage- | 0.138 | 2.736 | 0.186 | 513 |
| 291 | | | | |
| Phage- | 0.085 | 2.778 | 0.135 | 514 |
| 292 | | | | |
| Phage- | 0.137 | 2.698 | 0.184 | 515 |
| 293 | | | | |
| Phage- | 0.153 | 2.748 | 0.202 | 516 |
| 294 | | | | |
| Phage- | 0.111 | 1.025 | 0.129 | 517 |
| 295 | | | | |
| Phage- | 0.067 | 1.614 | 0.097 | 518 |
| 296 | | | | |
| Phage- | 0.130 | 2.740 | 0.180 | 519 |
| 297 | | | | |
| Phage- | 0.151 | 0.742 | 0.162 | 520 |
| 298 | | | | |
| Phage- | 0.090 | 2.747 | 0.142 | 521 |
| 299 | | | | |
| Phage- | 0.120 | 2.716 | 0.171 | 522 |
| 300 | | | | |
| Phage- | 0.084 | 2.756 | 0.136 | 523 |
| 301 | | | | |
| Phage- | 0.078 | 2.596 | 0.128 | 524 |
| 302 | | | | |
| Phage- | 0.220 | 2.754 | 0.270 | 525 |
| 303 | | | | |
| Phage- | 0.091 | 2.810 | 0.145 | 526 |
| 304 | | | | |
| Phage- | 0.119 | 2.341 | 0.163 | 527 |
| 305 | | | | |
| Phage- | 0.075 | 2.759 | 0.129 | 528 |
| 306 | | | | |
| Phage- | 0.064 | 2.052 | 0.105 | 529 |
| 307 | | | | |
| Phage- | 0.123 | 2.715 | 0.176 | 530 |
| 308 | | | | |
| Phage- | 0.138 | 2.750 | 0.192 | 531 |
| 309 | | | | |
| Phage- | 0.096 | 2.315 | 0.141 | 532 |
| 310 | | | | |
| Phage- | 0.273 | 2.656 | 0.323 | 533 |
| 311 | | | | |
| Phage- | 0.077 | 2.730 | 0.134 | 534 |
| 312 | | | | |
| Phage- | 0.064 | 0.214 | 0.068 | 535 |
| 313 | | | | |
| Phage- | 0.095 | 2.798 | 0.154 | 536 |
| 314 | | | | |
| Phage- | 0.068 | 0.455 | 0.077 | 537 |
| 315 | | | | |
| Phage- | 0.190 | 2.722 | 0.246 | 538 |
| 316 | | | | |
| Phage- | 0.172 | 2.722 | 0.229 | 539 |
| 317 | | | | |
| Phage- | 0.082 | 2.707 | 0.141 | 540 |
| 318 | | | | |
| Phage- | 0.066 | 2.001 | 0.110 | 541 |
| 319 | | | | |
| Phage- | 0.094 | 2.815 | 0.156 | 542 |
| 320 | | | | |
| Phage- | 0.099 | 2.694 | 0.159 | 543 |
| 321 | | | | |
| Phage- | 0.105 | 2.431 | 0.159 | 544 |
| 322 | | | | |
| Phage- | 0.090 | 2.753 | 0.153 | 545 |
| 323 | | | | |
| Phage- | 0.246 | 2.579 | 0.300 | 546 |
| 324 | | | | |
| Phage- | 0.072 | 2.701 | 0.134 | 547 |
| 325 | | | | |
| Phage- | 0.097 | 2.817 | 0.161 | 548 |
| 326 | | | | |
| Phage- | 0.087 | 2.167 | 0.136 | 549 |
| 327 | | | | |
| Phage- | 0.086 | 2.748 | 0.149 | 550 |
| 328 | | | | |
| Phage- | 0.195 | 2.709 | 0.254 | 551 |
| 329 | | | | |
| Phage- | 0.094 | 2.826 | 0.159 | 552 |
| 330 | | | | |
| Phage- | 0.076 | 2.453 | 0.134 | 553 |
| 331 | | | | |
| Phage- | 0.102 | 2.802 | 0.168 | 554 |
| 332 | | | | |
| Phage- | 0.092 | 2.854 | 0.160 | 555 |
| 333 | | | | |
| Phage- | 0.064 | 2.777 | 0.131 | 556 |
| 334 | | | | |
| Phage- | 0.110 | 2.725 | 0.175 | 557 |
| 335 | | | | |
| Phage- | 0.098 | 0.770 | 0.115 | 558 |
| 336 | | | | |
| Phage- | 0.324 | 2.701 | 0.384 | 559 |
| 337 | | | | |
| Phage- | 0.122 | 2.748 | 0.189 | 560 |
| 338 | | | | |
| Phage- | 0.110 | 2.734 | 0.177 | 561 |
| 339 | | | | |
| Phage- | 0.081 | 2.831 | 0.152 | 562 |
| 340 | | | | |
| Phage- | 0.076 | 2.320 | 0.133 | 563 |
| 341 | | | | |
| Phage- | 0.072 | 2.689 | 0.141 | 564 |
| 342 | | | | |
| Phage- | 0.089 | 2.810 | 0.162 | 565 |
| 343 | | | | |
| Phage- | 0.078 | 2.745 | 0.149 | 566 |
| 344 | | | | |
| Phage- | 0.116 | 2.710 | 0.186 | 567 |
| 345 | | | | |
| Phage- | 0.073 | 1.637 | 0.115 | 568 |
| 346 | | | | |
| Phage- | 0.104 | 2.723 | 0.175 | 569 |
| 347 | | | | |
| Phage- | 0.125 | 2.705 | 0.196 | 570 |
| 348 | | | | |
| Phage- | 0.185 | 2.664 | 0.254 | 571 |
| 349 | | | | |
| Phage- | 0.071 | 2.089 | 0.127 | 572 |
| 350 | | | | |
| Phage- | 0.138 | 2.739 | 0.211 | 573 |
| 351 | | | | |
| Phage- | 0.090 | 2.580 | 0.160 | 574 |
| 352 | | | | |
| Phage- | 0.075 | 2.718 | 0.150 | 575 |
| 353 | | | | |
| Phage- | 0.091 | 2.672 | 0.165 | 576 |
| 354 | | | | |
| Phage- | 0.080 | 1.244 | 0.113 | 577 |
| 355 | | | | |
| Phage- | 0.109 | 1.678 | 0.154 | 578 |
| 356 | | | | |
| Phage- | 0.071 | 2.746 | 0.148 | 579 |
| 357 | | | | |
| Phage- | 0.086 | 2.742 | 0.163 | 580 |
| 358 | | | | |
| Phage- | 0.173 | 2.720 | 0.247 | 581 |
| 359 | | | | |
| Phage- | 0.088 | 1.633 | 0.133 | 582 |
| 360 | | | | |
| Phage- | 0.101 | 2.723 | 0.178 | 583 |
| 361 | | | | |
| Phage- | 0.164 | 2.657 | 0.238 | 584 |
| 362 | | | | |
| Phage- | 0.203 | 2.362 | 0.268 | 585 |
| 363 | | | | |
| Phage- | 0.079 | 2.745 | 0.159 | 586 |
| 364 | | | | |
| Phage- | 0.083 | 2.459 | 0.155 | 587 |
| 365 | | | | |
| Phage- | 0.073 | 2.727 | 0.153 | 588 |
| 366 | | | | |
| Phage- | 0.067 | 2.814 | 0.151 | 589 |
| 367 | | | | |
| Phage- | 0.083 | 0.963 | 0.110 | 590 |
| 368 | | | | |
| Phage- | 0.081 | 2.380 | 0.153 | 591 |
| 369 | | | | |
| Phage- | 0.102 | 2.736 | 0.185 | 592 |
| 370 | | | | |
| Phage- | 0.080 | 2.832 | 0.167 | 593 |
| 371 | | | | |
| Phage- | 0.065 | 2.748 | 0.150 | 594 |
| 372 | | | | |
| Phage- | 0.075 | 2.625 | 0.157 | 595 |
| 373 | | | | |
| Phage- | 0.103 | 2.682 | 0.186 | 596 |
| 374 | | | | |
| Phage- | 0.293 | 2.501 | 0.364 | 597 |
| 375 | | | | |
| Phage- | 0.098 | 2.737 | 0.184 | 598 |
| 376 | | | | |
| Phage- | 0.101 | 2.645 | 0.185 | 599 |
| 377 | | | | |
| Phage- | 0.145 | 2.669 | 0.229 | 600 |
| 378 | | | | |
| Phage- | 0.270 | 2.714 | 0.352 | 601 |
| 379 | | | | |
| Phage- | 0.085 | 2.836 | 0.178 | 602 |
| 380 | | | | |
| Phage- | 0.171 | 2.722 | 0.257 | 603 |
| 381 | | | | |
| Phage- | 0.102 | 2.734 | 0.191 | 604 |
| 382 | | | | |
| Phage- | 0.066 | 2.054 | 0.135 | 605 |
| 383 | | | | |
| Phage- | 0.083 | 2.420 | 0.164 | 606 |
| 384 | | | | |
| Phage- | 0.184 | 2.744 | 0.273 | 607 |
| 385 | | | | |
| Phage- | 0.067 | 2.569 | 0.153 | 608 |
| 386 | | | | |
| Phage- | 0.065 | 2.744 | 0.158 | 609 |
| 387 | | | | |
| Phage- | 0.114 | 2.472 | 0.196 | 610 |
| 388 | | | | |
| Phage- | 0.107 | 2.269 | 0.182 | 611 |
| 389 | | | | |
| Phage- | 0.112 | 2.686 | 0.202 | 612 |
| 390 | | | | |
| Phage- | 0.138 | 2.736 | 0.229 | 613 |
| 391 | | | | |
| Phage- | 0.093 | 2.368 | 0.173 | 614 |
| 392 | | | | |
| Phage- | 0.483 | 2.699 | 0.562 | 615 |
| 393 | | | | |
| Phage- | 0.084 | 2.532 | 0.172 | 616 |
| 394 | | | | |
| Phage- | 0.117 | 2.755 | 0.212 | 617 |
| 395 | | | | |
| Phage- | 0.097 | 2.816 | 0.195 | 618 |
| 396 | | | | |
| Phage- | 0.151 | 2.741 | 0.244 | 619 |
| 397 | | | | |
| Phage- | 0.104 | 2.325 | 0.185 | 620 |
| 398 | | | | |
| Phage- | 0.293 | 2.705 | 0.381 | 621 |
| 399 | | | | |
| Phage- | 0.193 | 2.756 | 0.286 | 622 |
| 400 | | | | |
| Phage- | 0.072 | 2.725 | 0.169 | 623 |
| 401 | | | | |
| Phage- | 0.186 | 2.669 | 0.278 | 624 |
| 402 | | | | |
| Phage- | 0.070 | 2.764 | 0.170 | 625 |
| 403 | | | | |
| Phage- | 0.088 | 2.759 | 0.188 | 626 |
| 404 | | | | |
| Phage- | 0.077 | 2.692 | 0.176 | 627 |
| 405 | | | | |
| Phage- | 0.094 | 2.732 | 0.193 | 628 |
| 406 | | | | |
| Phage- | 0.126 | 2.695 | 0.223 | 629 |
| 407 | | | | |
| Phage- | 0.173 | 2.708 | 0.269 | 630 |
| 408 | | | | |
| Phage- | 0.158 | 2.706 | 0.255 | 631 |
| 409 | | | | |
| Phage- | 0.118 | 2.686 | 0.216 | 632 |
| 410 | | | | |
| Phage- | 0.126 | 2.757 | 0.227 | 633 |
| 411 | | | | |
| Phage- | 0.074 | 2.841 | 0.181 | 634 |
| 412 | | | | |
| Phage- | 0.075 | 1.993 | 0.150 | 635 |
| 413 | | | | |
| Phage- | 0.099 | 2.766 | 0.204 | 636 |
| 414 | | | | |
| Phage- | 0.145 | 2.713 | 0.246 | 637 |
| 415 | | | | |
| Phage- | 0.066 | 2.681 | 0.169 | 638 |
| 416 | | | | |
| Phage- | 0.296 | 2.734 | 0.393 | 639 |
| 417 | | | | |
| Phage- | 0.073 | 2.755 | 0.179 | 640 |
| 418 | | | | |
| Phage- | 0.088 | 1.788 | 0.156 | 641 |
| 419 | | | | |
| Phage- | 0.146 | 2.754 | 0.251 | 642 |
| 420 | | | | |
| Phage- | 0.075 | 2.740 | 0.183 | 643 |
| 421 | | | | |
| Phage- | 0.209 | 2.722 | 0.311 | 644 |
| 422 | | | | |
| Phage- | 0.072 | 2.741 | 0.180 | 645 |
| 423 | | | | |
| Phage- | 0.096 | 2.724 | 0.203 | 646 |
| 424 | | | | |
| Phage- | 0.099 | 2.822 | 0.212 | 647 |
| 425 | | | | |
| Phage- | 0.110 | 2.746 | 0.219 | 648 |
| 426 | | | | |
| Phage- | 0.112 | 2.738 | 0.221 | 649 |
| 427 | | | | |
| Phage- | 0.155 | 2.722 | 0.262 | 650 |
| 428 | | | | |
| Phage- | 0.096 | 2.723 | 0.206 | 651 |
| 429 | | | | |
| Phage- | 0.102 | 1.575 | 0.164 | 652 |
| 430 | | | | |
| Phage- | 0.079 | 2.715 | 0.190 | 653 |
| 431 | | | | |
| Phage- | 0.123 | 2.737 | 0.235 | 654 |
| 432 | | | | |
| Phage- | 0.125 | 2.754 | 0.238 | 655 |
| 433 | | | | |
| Phage- | 0.082 | 2.832 | 0.201 | 656 |
| 434 | | | | |
| Phage- | 0.138 | 2.728 | 0.251 | 657 |
| 435 | | | | |
| Phage- | 0.156 | 2.761 | 0.269 | 658 |
| 436 | | | | |
| Phage- | 0.104 | 1.959 | 0.185 | 659 |
| 437 | | | | |
| Phage- | 0.062 | 2.736 | 0.178 | 660 |
| 438 | | | | |
| Phage- | 0.090 | 2.455 | 0.194 | 661 |
| 439 | | | | |
| Phage- | 0.081 | 2.815 | 0.203 | 662 |
| 440 | | | | |
| Phage- | 0.077 | 2.787 | 0.198 | 663 |
| 441 | | | | |
| Phage- | 0.080 | 2.819 | 0.203 | 664 |
| 442 | | | | |
| Phage- | 0.107 | 2.733 | 0.225 | 665 |
| 443 | | | | |
| Phage- | 0.151 | 2.713 | 0.268 | 666 |
| 444 | | | | |
| Phage- | 0.068 | 2.463 | 0.177 | 667 |
| 445 | | | | |
| Phage- | 0.106 | 2.810 | 0.231 | 668 |
| 446 | | | | |
| Phage- | 0.071 | 2.749 | 0.195 | 669 |
| 447 | | | | |
| Phage- | 0.105 | 2.758 | 0.228 | 670 |
| 448 | | | | |
| Phage- | 0.073 | 1.323 | 0.133 | 671 |
| 449 | | | | |
| Phage- | 0.084 | 2.714 | 0.210 | 672 |
| 450 | | | | |
| Phage- | 0.184 | 2.670 | 0.303 | 673 |
| 451 | | | | |
| Phage- | 0.092 | 2.510 | 0.208 | 674 |
| 452 | | | | |
| Phage- | 0.073 | 1.776 | 0.155 | 675 |
| 453 | | | | |
| Phage- | 0.080 | 2.731 | 0.208 | 676 |
| 454 | | | | |
| Phage- | 0.082 | 2.716 | 0.210 | 677 |
| 455 | | | | |
| Phage- | 0.102 | 2.679 | 0.227 | 678 |
| 456 | | | | |
| Phage- | 0.090 | 2.836 | 0.224 | 679 |
| 457 | | | | |
| Phage- | 0.072 | 2.839 | 0.207 | 680 |
| 458 | | | | |
| Phage- | 0.097 | 2.688 | 0.224 | 681 |
| 459 | | | | |
| Phage- | 0.195 | 2.718 | 0.319 | 682 |
| 460 | | | | |
| Phage- | 0.077 | 1.592 | 0.151 | 683 |
| 461 | | | | |
| Phage- | 0.170 | 2.726 | 0.297 | 684 |
| 462 | | | | |
| Phage- | 0.214 | 2.745 | 0.340 | 685 |
| 463 | | | | |
| Phage- | 0.157 | 2.675 | 0.283 | 686 |
| 464 | | | | |
| Phage- | 0.069 | 2.061 | 0.169 | 687 |
| 465 | | | | |
| Phage- | 0.076 | 1.515 | 0.148 | 688 |
| 466 | | | | |
| Phage- | 0.081 | 2.743 | 0.215 | 689 |
| 467 | | | | |
| Phage- | 0.084 | 2.716 | 0.217 | 690 |
| 468 | | | | |
| Phage- | 0.147 | 2.552 | 0.268 | 691 |
| 469 | | | | |
| Phage- | 0.082 | 2.846 | 0.222 | 692 |
| 470 | | | | |
| Phage- | 0.086 | 2.805 | 0.226 | 693 |
| 471 | | | | |
| Phage- | 0.175 | 0.609 | 0.197 | 694 |
| 472 | | | | |
| Phage- | 0.075 | 2.620 | 0.208 | 695 |
| 473 | | | | |
| Phage- | 0.126 | 2.828 | 0.268 | 696 |
| 474 | | | | |
| Phage- | 0.312 | 2.705 | 0.438 | 697 |
| 475 | | | | |
| Phage- | 0.400 | 2.713 | 0.523 | 698 |
| 476 | | | | |
| Phage- | 0.086 | 2.736 | 0.228 | 699 |
| 477 | | | | |
| Phage- | 0.529 | 2.727 | 0.647 | 700 |
| 478 | | | | |
| Phage- | 0.138 | 2.721 | 0.277 | 701 |
| 479 | | | | |
| Phage- | 0.069 | 2.734 | 0.214 | 702 |
| 480 | | | | |
| Phage- | 0.151 | 2.738 | 0.292 | 703 |
| 481 | | | | |
| Phage- | 0.091 | 2.537 | 0.225 | 704 |
| 482 | | | | |
| Phage- | 0.144 | 1.356 | 0.211 | 705 |
| 483 | | | | |
| Phage- | 0.090 | 2.729 | 0.237 | 706 |
| 484 | | | | |
| Phage- | 0.222 | 2.736 | 0.362 | 707 |
| 485 | | | | |
| Phage- | 0.104 | 2.744 | 0.252 | 708 |
| 486 | | | | |
| Phage- | 0.126 | 2.229 | 0.244 | 709 |
| 487 | | | | |
| Phage- | 0.111 | 2.829 | 0.264 | 710 |
| 488 | | | | |
| Phage- | 0.161 | 2.729 | 0.306 | 711 |
| 489 | | | | |
| Phage- | 0.083 | 2.307 | 0.209 | 712 |
| 490 | | | | |
| Phage- | 0.243 | 2.802 | 0.388 | 713 |
| 491 | | | | |
| Phage- | 0.075 | 2.690 | 0.224 | 714 |
| 492 | | | | |
| Phage- | 0.118 | 2.571 | 0.260 | 715 |
| 493 | | | | |
| Phage- | 0.087 | 1.584 | 0.174 | 716 |
| 494 | | | | |
| Phage- | 0.188 | 2.717 | 0.335 | 717 |
| 495 | | | | |
| Phage- | 0.080 | 2.715 | 0.233 | 718 |
| 496 | | | | |
| Phage- | 0.078 | 2.845 | 0.238 | 719 |
| 497 | | | | |
| Phage- | 0.079 | 2.822 | 0.240 | 720 |
| 498 | | | | |
| Phage- | 0.170 | 1.697 | 0.260 | 721 |
| 499 | | | | |
| Phage- | 0.169 | 2.658 | 0.317 | 722 |
| 500 | | | | |
| Phage- | 0.069 | 2.028 | 0.186 | 723 |
| 501 | | | | |
| Phage- | 0.125 | 2.719 | 0.281 | 724 |
| 502 | | | | |
| Phage- | 0.220 | 2.657 | 0.367 | 725 |
| 503 | | | | |
| Phage- | 0.099 | 2.756 | 0.259 | 726 |
| 504 | | | | |
| Phage- | 0.100 | 0.083 | 0.099 | 727 |
| 505 | | | | |
| Phage- | 0.089 | 2.832 | 0.256 | 728 |
| 506 | | | | |
| Phage- | 0.242 | 2.757 | 0.396 | 729 |
| 507 | | | | |
| Phage- | 0.079 | 2.711 | 0.240 | 730 |
| 508 | | | | |
| Phage- | 0.162 | 2.698 | 0.318 | 731 |
| 509 | | | | |
| Phage- | 0.106 | 2.734 | 0.268 | 732 |
| 510 | | | | |
| Phage- | 0.082 | 2.772 | 0.249 | 733 |
| 511 | | | | |
| Phage- | 0.081 | 2.668 | 0.241 | 734 |
| 512 | | | | |
| Phage- | 0.118 | 2.745 | 0.282 | 735 |
| 513 | | | | |
| Phage- | 0.129 | 2.725 | 0.292 | 736 |
| 514 | | | | |
| Phage- | 0.093 | 2.834 | 0.265 | 737 |
| 515 | | | | |
| Phage- | 0.101 | 2.714 | 0.267 | 738 |
| 516 | | | | |
| Phage- | 0.080 | 2.362 | 0.225 | 739 |
| 517 | | | | |
| Phage- | 0.085 | 2.736 | 0.255 | 740 |
| 518 | | | | |
| Phage- | 0.063 | 2.763 | 0.237 | 741 |
| 519 | | | | |
| Phage- | 0.086 | 2.847 | 0.264 | 742 |
| 520 | | | | |
| Phage- | 0.062 | 2.784 | 0.238 | 743 |
| 521 | | | | |
| Phage- | 0.103 | 2.839 | 0.280 | 744 |
| 522 | | | | |
| Phage- | 0.155 | 2.824 | 0.327 | 745 |
| 523 | | | | |
| Phage- | 0.164 | 2.827 | 0.337 | 746 |
| 524 | | | | |
| Phage- | 0.132 | 2.741 | 0.301 | 747 |
| 525 | | | | |
| Phage- | 0.105 | 1.856 | 0.219 | 748 |
| 526 | | | | |
| Phage- | 0.091 | 2.718 | 0.263 | 749 |
| 527 | | | | |
| Phage- | 0.172 | 2.700 | 0.338 | 750 |
| 528 | | | | |
| Phage- | 0.111 | 2.687 | 0.280 | 751 |
| 529 | | | | |
| Phage- | 0.069 | 2.749 | 0.245 | 752 |
| 530 | | | | |
| Phage- | 0.084 | 2.755 | 0.261 | 753 |
| 531 | | | | |
| Phage- | 0.087 | 2.727 | 0.263 | 754 |
| 532 | | | | |
| Phage- | 0.141 | 2.694 | 0.312 | 755 |
| 533 | | | | |
| Phage- | 0.077 | 2.713 | 0.253 | 756 |
| 534 | | | | |
| Phage- | 0.153 | 2.730 | 0.325 | 757 |
| 535 | | | | |
| Phage- | 0.210 | 2.400 | 0.357 | 758 |
| 536 | | | | |
| Phage- | 0.217 | 2.731 | 0.386 | 759 |
| 537 | | | | |
| Phage- | 0.150 | 2.703 | 0.322 | 760 |
| 538 | | | | |
| Phage- | 0.384 | 2.714 | 0.542 | 761 |
| 539 | | | | |
| Phage- | 0.092 | 2.745 | 0.274 | 762 |
| 540 | | | | |
| Phage- | 0.186 | 2.749 | 0.362 | 763 |
| 541 | | | | |
| Phage- | 0.072 | 2.743 | 0.256 | 764 |
| 542 | | | | |
| Phage- | 0.154 | 2.718 | 0.330 | 765 |
| 543 | | | | |
| Phage- | 0.094 | 2.736 | 0.277 | 766 |
| 544 | | | | |
| Phage- | 0.102 | 2.755 | 0.285 | 767 |
| 545 | | | | |
| Phage- | 0.074 | 2.836 | 0.265 | 768 |
| 546 | | | | |
| Phage- | 0.096 | 2.750 | 0.282 | 769 |
| 547 | | | | |
| Phage- | 0.090 | 2.725 | 0.274 | 770 |
| 548 | | | | |
| Phage- | 0.103 | 2.838 | 0.296 | 771 |
| 549 | | | | |
| Phage- | 0.110 | 2.362 | 0.269 | 772 |
| 550 | | | | |
| Phage- | 0.124 | 2.723 | 0.308 | 773 |
| 551 | | | | |
| Phage- | 0.065 | 1.332 | 0.155 | 774 |
| 552 | | | | |
| Phage- | 0.073 | 2.702 | 0.259 | 775 |
| 553 | | | | |
| Phage- | 0.260 | 2.703 | 0.434 | 776 |
| 554 | | | | |
| Phage- | 0.151 | 2.837 | 0.344 | 777 |
| 555 | | | | |
| Phage- | 0.134 | 2.802 | 0.326 | 778 |
| 556 | | | | |
| Phage- | 0.198 | 2.676 | 0.377 | 779 |
| 557 | | | | |
| Phage- | 0.072 | 2.820 | 0.272 | 780 |
| 558 | | | | |
| Phage- | 0.142 | 2.696 | 0.329 | 781 |
| 559 | | | | |
| Phage- | 0.088 | 2.654 | 0.277 | 782 |
| 560 | | | | |
| Phage- | 0.092 | 2.746 | 0.287 | 783 |
| 561 | | | | |
| Phage- | 0.187 | 2.740 | 0.375 | 784 |
| 562 | | | | |
| Phage- | 0.069 | 2.321 | 0.236 | 785 |
| 563 | | | | |
| Phage- | 0.142 | 2.737 | 0.336 | 786 |
| 564 | | | | |
| Phage- | 0.079 | 2.679 | 0.273 | 787 |
| 565 | | | | |
| Phage- | 0.074 | 2.733 | 0.273 | 788 |
| 566 | | | | |
| Phage- | 0.163 | 2.695 | 0.353 | 789 |
| 567 | | | | |
| Phage- | 0.079 | 2.697 | 0.276 | 790 |
| 568 | | | | |
| Phage- | 0.090 | 2.738 | 0.288 | 791 |
| 569 | | | | |
| Phage- | 0.070 | 2.004 | 0.216 | 792 |
| 570 | | | | |
| Phage- | 0.431 | 2.750 | 0.606 | 793 |
| 571 | | | | |
| Phage- | 0.084 | 1.931 | 0.223 | 794 |
| 572 | | | | |
| Phage- | 0.176 | 2.753 | 0.370 | 795 |
| 573 | | | | |
| Phage- | 0.230 | 2.742 | 0.421 | 796 |
| 574 | | | | |
| Phage- | 0.139 | 2.755 | 0.340 | 797 |
| 575 | | | | |
| Phage- | 0.082 | 2.676 | 0.282 | 798 |
| 576 | | | | |
| Phage- | 0.105 | 2.697 | 0.305 | 799 |
| 577 | | | | |
| Phage- | 0.082 | 2.748 | 0.288 | 800 |
| 578 | | | | |
| Phage- | 0.124 | 2.833 | 0.335 | 801 |
| 579 | | | | |
| Phage- | 0.101 | 2.731 | 0.305 | 802 |
| 580 | | | | |
| Phage- | 0.082 | 2.732 | 0.288 | 803 |
| 581 | | | | |
| Phage- | 0.237 | 2.715 | 0.430 | 804 |
| 582 | | | | |
| Phage- | 0.327 | 2.697 | 0.512 | 805 |
| 583 | | | | |
| Phage- | 0.411 | 2.750 | 0.594 | 806 |
| 584 | | | | |
| Phage- | 0.132 | 2.588 | 0.326 | 807 |
| 585 | | | | |
| Phage- | 0.188 | 2.806 | 0.395 | 808 |
| 586 | | | | |
| Phage- | 0.102 | 2.192 | 0.272 | 809 |
| 587 | | | | |
| Phage- | 0.084 | 2.822 | 0.307 | 810 |
| 588 | | | | |
| Phage- | 0.072 | 2.743 | 0.289 | 811 |
| 589 | | | | |
| Phage- | 0.077 | 2.724 | 0.293 | 812 |
| 590 | | | | |
| Phage- | 0.076 | 2.132 | 0.244 | 813 |
| 591 | | | | |
| Phage- | 0.116 | 2.755 | 0.334 | 814 |
| 592 | | | | |
| Phage- | 0.182 | 2.829 | 0.401 | 815 |
| 593 | | | | |
| Phage- | 0.193 | 2.716 | 0.402 | 816 |
| 594 | | | | |
| Phage- | 0.064 | 1.493 | 0.182 | 817 |
| 595 | | | | |
| Phage- | 0.595 | 2.722 | 0.771 | 818 |
| 596 | | | | |
| Phage- | 0.151 | 2.827 | 0.375 | 819 |
| 597 | | | | |
| Phage- | 0.074 | 2.775 | 0.300 | 820 |
| 598 | | | | |
| Phage- | 0.108 | 2.656 | 0.323 | 821 |
| 599 | | | | |
| Phage- | 0.089 | 2.735 | 0.313 | 822 |
| 600 | | | | |
| Phage- | 0.173 | 2.760 | 0.392 | 823 |
| 601 | | | | |
| Phage- | 0.282 | 2.739 | 0.490 | 824 |
| 602 | | | | |
| Phage- | 0.250 | 2.708 | 0.459 | 825 |
| 603 | | | | |
| Phage- | 0.220 | 2.835 | 0.443 | 826 |
| 604 | | | | |
| Phage- | 0.117 | 2.698 | 0.337 | 827 |
| 605 | | | | |
| Phage- | 0.076 | 2.713 | 0.302 | 828 |
| 606 | | | | |
| Phage- | 0.070 | 2.740 | 0.299 | 829 |
| 607 | | | | |
| Phage- | 0.239 | 2.161 | 0.405 | 830 |
| 608 | | | | |
| Phage- | 0.220 | 2.763 | 0.444 | 831 |
| 609 | | | | |
| Phage- | 0.148 | 2.693 | 0.373 | 832 |
| 610 | | | | |
| Phage- | 0.156 | 2.742 | 0.386 | 833 |
| 611 | | | | |
| Phage- | 0.173 | 2.730 | 0.401 | 834 |
| 612 | | | | |
| Phage- | 0.074 | 2.752 | 0.313 | 835 |
| 613 | | | | |
| Phage- | 0.115 | 2.673 | 0.347 | 836 |
| 614 | | | | |
| Phage- | 0.135 | 2.832 | 0.381 | 837 |
| 615 | | | | |
| Phage- | 0.086 | 2.745 | 0.328 | 838 |
| 616 | | | | |
| Phage- | 0.121 | 2.747 | 0.361 | 839 |
| 617 | | | | |
| Phage- | 0.169 | 2.743 | 0.405 | 840 |
| 618 | | | | |
| Phage- | 0.103 | 2.042 | 0.281 | 841 |
| 619 | | | | |
| Phage- | 0.079 | 2.723 | 0.322 | 842 |
| 620 | | | | |
| Phage- | 0.094 | 2.843 | 0.346 | 843 |
| 621 | | | | |
| Phage- | 0.173 | 2.737 | 0.411 | 844 |
| 622 | | | | |
| Phage- | 0.130 | 2.734 | 0.372 | 845 |
| 623 | | | | |
| Phage- | 0.103 | 2.735 | 0.348 | 846 |
| 624 | | | | |
| Phage- | 0.113 | 2.740 | 0.360 | 847 |
| 625 | | | | |
| Phage- | 0.098 | 2.784 | 0.351 | 848 |
| 626 | | | | |
| Phage- | 0.076 | 2.844 | 0.337 | 849 |
| 627 | | | | |
| Phage- | 0.405 | 2.705 | 0.622 | 850 |
| 628 | | | | |
| Phage- | 0.204 | 2.764 | 0.445 | 851 |
| 629 | | | | |
| Phage- | 0.092 | 2.027 | 0.275 | 852 |
| 630 | | | | |
| Phage- | 0.132 | 2.714 | 0.376 | 853 |
| 631 | | | | |
| Phage- | 0.760 | 2.768 | 0.955 | 854 |
| 632 | | | | |
| Phage- | 0.258 | 2.738 | 0.499 | 855 |
| 633 | | | | |
| Phage- | 0.224 | 2.708 | 0.469 | 856 |
| 634 | | | | |
| Phage- | 0.213 | 2.697 | 0.461 | 857 |
| 635 | | | | |
| Phage- | 0.142 | 2.700 | 0.401 | 858 |
| 636 | | | | |
| Phage- | 0.146 | 2.718 | 0.409 | 859 |
| 637 | | | | |
| Phage- | 0.133 | 2.700 | 0.395 | 860 |
| 638 | | | | |
| Phage- | 0.225 | 2.846 | 0.494 | 861 |
| 639 | | | | |
| Phage- | 0.082 | 2.751 | 0.356 | 862 |
| 640 | | | | |
| Phage- | 0.068 | 2.180 | 0.287 | 863 |
| 641 | | | | |
| Phage- | 0.145 | 2.775 | 0.419 | 864 |
| 642 | | | | |
| Phage- | 0.134 | 2.536 | 0.386 | 865 |
| 643 | | | | |
| Phage- | 0.107 | 2.721 | 0.382 | 866 |
| 644 | | | | |
| Phage- | 0.069 | 1.074 | 0.176 | 867 |
| 645 | | | | |
| Phage- | 0.176 | 2.696 | 0.445 | 868 |
| 646 | | | | |
| Phage- | 0.074 | 2.821 | 0.368 | 869 |
| 647 | | | | |
| Phage- | 0.110 | 2.735 | 0.392 | 870 |
| 648 | | | | |
| Phage- | 0.203 | 2.737 | 0.475 | 871 |
| 649 | | | | |
| Phage- | 0.096 | 2.853 | 0.394 | 872 |
| 650 | | | | |
| Phage- | 0.193 | 2.683 | 0.463 | 873 |
| 651 | | | | |
| Phage- | 0.078 | 2.849 | 0.379 | 874 |
| 652 | | | | |
| Phage- | 0.103 | 2.743 | 0.392 | 875 |
| 653 | | | | |
| Phage- | 0.147 | 2.741 | 0.433 | 876 |
| 654 | | | | |
| Phage- | 0.121 | 2.750 | 0.411 | 877 |
| 655 | | | | |
| Phage- | 0.188 | 2.725 | 0.469 | 878 |
| 656 | | | | |
| Phage- | 0.120 | 2.647 | 0.400 | 879 |
| 657 | | | | |
| Phage- | 0.073 | 2.735 | 0.370 | 880 |
| 658 | | | | |
| Phage- | 0.170 | 2.712 | 0.455 | 881 |
| 659 | | | | |
| Phage- | 0.106 | 2.705 | 0.398 | 882 |
| 660 | | | | |
| Phage- | 0.166 | 2.713 | 0.453 | 883 |
| 661 | | | | |
| Phage- | 0.096 | 2.672 | 0.386 | 884 |
| 662 | | | | |
| Phage- | 0.182 | 2.674 | 0.463 | 885 |
| 663 | | | | |
| Phage- | 0.087 | 2.813 | 0.396 | 886 |
| 664 | | | | |
| Phage- | 0.092 | 2.730 | 0.391 | 887 |
| 665 | | | | |
| Phage- | 0.325 | 2.741 | 0.599 | 888 |
| 666 | | | | |
| Phage- | 0.110 | 2.721 | 0.407 | 889 |
| 667 | | | | |
| Phage- | 0.163 | 2.680 | 0.451 | 890 |
| 668 | | | | |
| Phage- | 0.282 | 2.609 | 0.550 | 891 |
| 669 | | | | |
| Phage- | 0.088 | 2.739 | 0.394 | 892 |
| 670 | | | | |
| Phage- | 0.147 | 2.853 | 0.461 | 893 |
| 671 | | | | |
| Phage- | 0.124 | 2.724 | 0.426 | 894 |
| 672 | | | | |
| Phage- | 0.198 | 2.824 | 0.503 | 895 |
| 673 | | | | |
| Phage- | 0.182 | 2.799 | 0.486 | 896 |
| 674 | | | | |
| Phage- | 0.097 | 0.831 | 0.183 | 897 |
| 675 | | | | |
| Phage- | 0.419 | 2.697 | 0.689 | 898 |
| 676 | | | | |
| Phage- | 0.130 | 2.764 | 0.443 | 899 |
| 677 | | | | |
| Phage- | 0.150 | 2.816 | 0.471 | 900 |
| 678 | | | | |
| Phage- | 0.115 | 2.720 | 0.430 | 901 |
| 679 | | | | |
| Phage- | 0.218 | 2.740 | 0.522 | 902 |
| 680 | | | | |
| Phage- | 0.145 | 2.714 | 0.456 | 903 |
| 681 | | | | |
| Phage- | 0.153 | 2.712 | 0.464 | 904 |
| 682 | | | | |
| Phage- | 0.083 | 2.696 | 0.403 | 905 |
| 683 | | | | |
| Phage- | 0.068 | 2.706 | 0.391 | 906 |
| 684 | | | | |
| Phage- | 0.087 | 2.709 | 0.409 | 907 |
| 685 | | | | |
| Phage- | 0.073 | 1.763 | 0.280 | 908 |
| 686 | | | | |
| Phage- | 0.113 | 2.824 | 0.446 | 909 |
| 687 | | | | |
| Phage- | 0.109 | 2.741 | 0.435 | 910 |
| 688 | | | | |
| Phage- | 0.088 | 2.754 | 0.419 | 911 |
| 689 | | | | |
| Phage- | 0.310 | 2.739 | 0.621 | 912 |
| 690 | | | | |
| Phage- | 0.150 | 2.735 | 0.482 | 913 |
| 691 | | | | |
| Phage- | 0.127 | 2.713 | 0.460 | 914 |
| 692 | | | | |
| Phage- | 0.141 | 2.732 | 0.475 | 915 |
| 693 | | | | |
| Phage- | 0.080 | 2.700 | 0.421 | 916 |
| 694 | | | | |
| Phage- | 0.316 | 2.691 | 0.625 | 917 |
| 695 | | | | |
| Phage- | 0.151 | 2.758 | 0.493 | 918 |
| 696 | | | | |
| Phage- | 0.082 | 2.625 | 0.419 | 919 |
| 697 | | | | |
| Phage- | 0.089 | 2.739 | 0.441 | 920 |
| 698 | | | | |
| Phage- | 0.342 | 2.683 | 0.654 | 921 |
| 699 | | | | |
| Phage- | 0.157 | 2.697 | 0.497 | 922 |
| 700 | | | | |
| Phage- | 0.136 | 2.723 | 0.487 | 923 |
| 701 | | | | |
| Phage- | 0.108 | 0.383 | 0.146 | 924 |
| 702 | | | | |
| Phage- | 0.105 | 2.755 | 0.470 | 925 |
| 703 | | | | |
| Phage- | 0.109 | 1.973 | 0.366 | 926 |
| 704 | | | | |
| Phage- | 0.147 | 2.683 | 0.497 | 927 |
| 705 | | | | |
| Phage- | 0.094 | 2.729 | 0.458 | 928 |
| 706 | | | | |
| Phage- | 0.156 | 2.704 | 0.508 | 929 |
| 707 | | | | |
| Phage- | 0.098 | 2.847 | 0.478 | 930 |
| 708 | | | | |
| Phage- | 0.094 | 2.711 | 0.456 | 931 |
| 709 | | | | |
| Phage- | 0.154 | 2.753 | 0.514 | 932 |
| 710 | | | | |
| Phage- | 0.075 | 2.731 | 0.444 | 933 |
| 711 | | | | |
| Phage- | 0.109 | 2.710 | 0.471 | 934 |
| 712 | | | | |
| Phage- | 0.153 | 2.845 | 0.529 | 935 |
| 713 | | | | |
| Phage- | 0.313 | 2.662 | 0.641 | 936 |
| 714 | | | | |
| Phage- | 0.352 | 2.710 | 0.684 | 937 |
| 715 | | | | |
| Phage- | 0.195 | 2.807 | 0.563 | 938 |
| 716 | | | | |
| Phage- | 0.180 | 2.727 | 0.541 | 939 |
| 717 | | | | |
| Phage- | 0.083 | 2.713 | 0.457 | 940 |
| 718 | | | | |
| Phage- | 0.125 | 2.746 | 0.498 | 941 |
| 719 | | | | |
| Phage- | 0.166 | 2.719 | 0.530 | 942 |
| 720 | | | | |
| Phage- | 0.274 | 2.707 | 0.626 | 943 |
| 721 | | | | |
| Phage- | 0.070 | 0.666 | 0.156 | 944 |
| 722 | | | | |
| Phage- | 0.131 | 2.696 | 0.505 | 945 |
| 723 | | | | |
| Phage- | 0.077 | 2.710 | 0.461 | 946 |
| 724 | | | | |
| Phage- | 0.300 | 2.749 | 0.658 | 947 |
| 725 | | | | |
| Phage- | 0.123 | 2.719 | 0.507 | 948 |
| 726 | | | | |
| Phage- | 0.073 | 2.656 | 0.455 | 949 |
| 727 | | | | |
| Phage- | 0.167 | 2.739 | 0.552 | 950 |
| 728 | | | | |
| Phage- | 0.126 | 2.709 | 0.512 | 951 |
| 729 | | | | |
| Phage- | 0.083 | 2.594 | 0.459 | 952 |
| 730 | | | | |
| Phage- | 0.104 | 2.728 | 0.498 | 953 |
| 731 | | | | |
| Phage- | 0.139 | 2.717 | 0.526 | 954 |
| 732 | | | | |
| Phage- | 0.086 | 2.745 | 0.486 | 955 |
| 733 | | | | |
| Phage- | 0.226 | 2.714 | 0.602 | 956 |
| 734 | | | | |
| Phage- | 0.131 | 2.723 | 0.524 | 957 |
| 735 | | | | |
| Phage- | 0.070 | 2.723 | 0.474 | 958 |
| 736 | | | | |
| Phage- | 0.159 | 2.753 | 0.555 | 959 |
| 737 | | | | |
| Phage- | 0.218 | 2.696 | 0.598 | 960 |
| 738 | | | | |
| Phage- | 0.078 | 2.741 | 0.488 | 961 |
| 739 | | | | |
| Phage- | 0.167 | 2.753 | 0.567 | 962 |
| 740 | | | | |
| Phage- | 0.349 | 2.716 | 0.717 | 963 |
| 741 | | | | |
| Phage- | 0.099 | 2.849 | 0.528 | 964 |
| 742 | | | | |
| Phage- | 0.202 | 2.721 | 0.598 | 965 |
| 743 | | | | |
| Phage- | 0.089 | 2.746 | 0.508 | 966 |
| 744 | | | | |
| Phage- | 0.086 | 0.545 | 0.159 | 967 |
| 745 | | | | |
| Phage- | 0.105 | 2.839 | 0.539 | 968 |
| 746 | | | | |
| Phage- | 0.106 | 2.851 | 0.543 | 969 |
| 747 | | | | |
| Phage- | 0.097 | 2.832 | 0.541 | 970 |
| 748 | | | | |
| Phage- | 0.194 | 2.721 | 0.605 | 971 |
| 749 | | | | |
| Phage- | 0.098 | 2.739 | 0.530 | 972 |
| 750 | | | | |
| Phage- | 0.077 | 2.547 | 0.483 | 973 |
| 751 | | | | |
| Phage- | 0.183 | 2.681 | 0.595 | 974 |
| 752 | | | | |
| Phage- | 0.310 | 2.838 | 0.734 | 975 |
| 753 | | | | |
| Phage- | 0.071 | 2.736 | 0.526 | 976 |
| 754 | | | | |
| Phage- | 0.063 | 0.767 | 0.183 | 977 |
| 755 | | | | |
| Phage- | 0.075 | 2.853 | 0.550 | 978 |
| 756 | | | | |
| Phage- | 0.150 | 2.711 | 0.589 | 979 |
| 757 | | | | |
| Phage- | 0.291 | 2.755 | 0.715 | 980 |
| 758 | | | | |
| Phage- | 0.441 | 2.714 | 0.839 | 981 |
| 759 | | | | |
| Phage- | 0.195 | 2.673 | 0.629 | 982 |
| 760 | | | | |
| Phage- | 0.123 | 2.737 | 0.583 | 983 |
| 761 | | | | |
| Phage- | 0.311 | 2.725 | 0.738 | 984 |
| 762 | | | | |
| Phage- | 0.095 | 2.737 | 0.563 | 985 |
| 763 | | | | |
| Phage- | 0.090 | 2.706 | 0.554 | 986 |
| 764 | | | | |
| Phage- | 0.102 | 2.753 | 0.573 | 987 |
| 765 | | | | |
| Phage- | 0.228 | 2.753 | 0.678 | 988 |
| 766 | | | | |
| Phage- | 0.171 | 2.719 | 0.627 | 989 |
| 767 | | | | |
| Phage- | 0.182 | 2.700 | 0.637 | 990 |
| 768 | | | | |
| Phage- | 0.112 | 2.753 | 0.590 | 991 |
| 769 | | | | |
| Phage- | 0.085 | 2.737 | 0.566 | 992 |
| 770 | | | | |
| Phage- | 0.085 | 2.744 | 0.568 | 993 |
| 771 | | | | |
| Phage- | 0.239 | 2.826 | 0.710 | 994 |
| 772 | | | | |
| Phage- | 0.067 | 2.724 | 0.557 | 995 |
| 773 | | | | |
| Phage- | 0.142 | 2.833 | 0.640 | 996 |
| 774 | | | | |
| Phage- | 0.192 | 2.780 | 0.671 | 997 |
| 775 | | | | |
| Phage- | 0.462 | 2.755 | 0.887 | 998 |
| 776 | | | | |
| Phage- | 0.095 | 2.724 | 0.583 | 999 |
| 777 | | | | |
| Phage- | 0.187 | 2.858 | 0.687 | 1000 |
| 778 | | | | |
| Phage- | 0.176 | 2.759 | 0.659 | 1001 |
| 779 | | | | |
| Phage- | 0.250 | 2.831 | 0.735 | 1002 |
| 780 | | | | |
| Phage- | 0.109 | 0.631 | 0.207 | 1003 |
| 781 | | | | |
| Phage- | 0.093 | 2.780 | 0.599 | 1004 |
| 782 | | | | |
| Phage- | 0.433 | 2.737 | 0.869 | 1005 |
| 783 | | | | |
| Phage- | 0.406 | 2.818 | 0.862 | 1006 |
| 784 | | | | |
| Phage- | 0.121 | 2.837 | 0.639 | 1007 |
| 785 | | | | |
| Phage- | 0.111 | 2.754 | 0.619 | 1008 |
| 786 | | | | |
| Phage- | 0.092 | 2.743 | 0.603 | 1009 |
| 787 | | | | |
| Phage- | 0.097 | 2.849 | 0.630 | 1010 |
| 788 | | | | |
| Phage- | 0.139 | 2.839 | 0.663 | 1011 |
| 789 | | | | |
| Phage- | 0.080 | 2.788 | 0.612 | 1012 |
| 790 | | | | |
| Phage- | 0.171 | 2.724 | 0.672 | 1013 |
| 791 | | | | |
| Phage- | 0.094 | 2.708 | 0.612 | 1014 |
| 792 | | | | |
| Phage- | 0.386 | 2.858 | 0.877 | 1015 |
| 793 | | | | |
| Phage- | 0.343 | 2.832 | 0.846 | 1016 |
| 794 | | | | |
| Phage- | 0.103 | 2.869 | 0.663 | 1017 |
| 795 | | | | |
| Phage- | 0.105 | 2.832 | 0.660 | 1018 |
| 796 | | | | |
| Phage- | 0.099 | 2.729 | 0.635 | 1019 |
| 797 | | | | |
| Phage- | 0.291 | 2.732 | 0.791 | 1020 |
| 798 | | | | |
| Phage- | 0.098 | 2.823 | 0.658 | 1021 |
| 799 | | | | |
| Phage- | 0.145 | 2.691 | 0.682 | 1022 |
| 800 | | | | |
| Phage- | 0.073 | 2.735 | 0.639 | 1023 |
| 801 | | | | |
| Phage- | 0.136 | 2.735 | 0.697 | 1024 |
| 802 | | | | |
| Phage- | 0.074 | 2.721 | 0.646 | 1025 |
| 803 | | | | |
| Phage- | 0.709 | 2.687 | 1.137 | 1026 |
| 804 | | | | |
| Phage- | 0.115 | 0.066 | 0.105 | 1027 |
| 805 | | | | |
| Phage- | 0.824 | 2.717 | 1.236 | 1028 |
| 806 | | | | |
| Phage- | 0.330 | 2.727 | 0.851 | 1029 |
| 807 | | | | |
| Phage- | 0.093 | 2.824 | 0.689 | 1030 |
| 808 | | | | |
| Phage- | 0.506 | 2.727 | 0.995 | 1031 |
| 809 | | | | |
| Phage- | 0.142 | 2.721 | 0.719 | 1032 |
| 810 | | | | |
| Phage- | 0.084 | 2.740 | 0.678 | 1033 |
| 811 | | | | |
| Phage- | 0.079 | 2.760 | 0.681 | 1034 |
| 812 | | | | |
| Phage- | 1.432 | 2.725 | 1.725 | 1035 |
| 813 | | | | |
| Phage- | 0.090 | 2.413 | 0.617 | 1036 |
| 814 | | | | |
| Phage- | 0.075 | 2.843 | 0.711 | 1037 |
| 815 | | | | |
| Phage- | 0.070 | 2.719 | 0.680 | 1038 |
| 816 | | | | |
| Phage- | 0.090 | 2.718 | 0.698 | 1039 |
| 817 | | | | |
| Phage- | 0.761 | 2.730 | 1.218 | 1040 |
| 818 | | | | |
| Phage- | 0.079 | 0.186 | 0.103 | 1041 |
| 819 | | | | |
| Phage- | 0.621 | 2.743 | 1.115 | 1042 |
| 820 | | | | |
| Phage- | 0.131 | 2.708 | 0.732 | 1043 |
| 821 | | | | |
| Phage- | 0.121 | 2.687 | 0.729 | 1044 |
| 822 | | | | |
| Phage- | 0.099 | 0.088 | 0.096 | 1045 |
| 823 | | | | |
| Phage- | 0.181 | 2.751 | 0.799 | 1046 |
| 824 | | | | |
| Phage- | 0.288 | 2.742 | 0.881 | 1047 |
| 825 | | | | |
| Phage- | 0.106 | 2.737 | 0.742 | 1048 |
| 826 | | | | |
| Phage- | 0.154 | 2.760 | 0.790 | 1049 |
| 827 | | | | |
| Phage- | 0.078 | 2.641 | 0.704 | 1050 |
| 828 | | | | |
| Phage- | 0.870 | 2.714 | 1.321 | 1051 |
| 829 | | | | |
| Phage- | 0.578 | 2.745 | 1.115 | 1052 |
| 830 | | | | |
| Phage- | 0.369 | 2.819 | 0.978 | 1053 |
| 831 | | | | |
| Phage- | 0.116 | 2.845 | 0.796 | 1054 |
| 832 | | | | |
| Phage- | 0.108 | 2.748 | 0.766 | 1055 |
| 833 | | | | |
| Phage- | 0.104 | 2.741 | 0.765 | 1056 |
| 834 | | | | |
| Phage- | 0.083 | 0.755 | 0.255 | 1057 |
| 835 | | | | |
| Phage- | 0.077 | 2.849 | 0.795 | 1058 |
| 836 | | | | |
| Phage- | 0.084 | 2.733 | 0.772 | 1059 |
| 837 | | | | |
| Phage- | 0.259 | 2.752 | 0.908 | 1060 |
| 838 | | | | |
| Phage- | 0.154 | 2.746 | 0.830 | 1061 |
| 839 | | | | |
| Phage- | 0.085 | 2.745 | 0.781 | 1062 |
| 840 | | | | |
| Phage- | 0.294 | 2.098 | 0.768 | 1063 |
| 841 | | | | |
| Phage- | 2.648 | 2.751 | 2.675 | 1064 |
| 842 | | | | |
| Phage- | 0.183 | 2.746 | 0.860 | 1065 |
| 843 | | | | |
| Phage- | 0.281 | 2.762 | 0.947 | 1066 |
| 844 | | | | |
| Phage- | 0.207 | 2.717 | 0.881 | 1067 |
| 845 | | | | |
| Phage- | 0.625 | 2.711 | 1.186 | 1068 |
| 846 | | | | |
| Phage- | 0.727 | 0.580 | 0.686 | 1069 |
| 847 | | | | |
| Phage- | 0.141 | 2.764 | 0.863 | 1070 |
| 848 | | | | |
| Phage- | 0.193 | 2.736 | 0.901 | 1071 |
| 849 | | | | |
| Phage- | 0.409 | 2.621 | 1.042 | 1072 |
| 850 | | | | |
| Phage- | 0.234 | 2.827 | 0.979 | 1073 |
| 851 | | | | |
| Phage- | 0.086 | 0.066 | 0.080 | 1074 |
| 852 | | | | |
| Phage- | 0.116 | 2.838 | 0.927 | 1075 |
| 853 | | | | |
| Phage- | 0.147 | 2.815 | 0.951 | 1076 |
| 854 | | | | |
| Phage- | 0.078 | 2.754 | 0.888 | 1077 |
| 855 | | | | |
| Phage- | 0.086 | 2.717 | 0.887 | 1078 |
| 856 | | | | |
| Phage- | 0.099 | 2.729 | 0.902 | 1079 |
| 857 | | | | |
| Phage- | 0.103 | 2.870 | 0.948 | 1080 |
| 858 | | | | |
| Phage- | 0.082 | 2.774 | 0.923 | 1081 |
| 859 | | | | |
| Phage- | 0.117 | 2.736 | 0.940 | 1082 |
| 860 | | | | |
| Phage- | 0.184 | 0.066 | 0.147 | 1083 |
| 861 | | | | |
| Phage- | 0.116 | 2.729 | 0.938 | 1084 |
| 862 | | | | |
| Phage- | 0.506 | 2.748 | 1.220 | 1085 |
| 863 | | | | |
| Phage- | 0.066 | 2.329 | 0.787 | 1086 |
| 864 | | | | |
| Phage- | 0.162 | 2.753 | 0.999 | 1087 |
| 865 | | | | |
| Phage- | 0.098 | 2.750 | 0.957 | 1088 |
| 866 | | | | |
| Phage- | 0.488 | 2.730 | 1.221 | 1089 |
| 867 | | | | |
| Phage- | 0.089 | 0.076 | 0.084 | 1090 |
| 868 | | | | |
| Phage- | 0.187 | 2.811 | 1.059 | 1091 |
| 869 | | | | |
| Phage- | 0.089 | 2.731 | 0.974 | 1092 |
| 870 | | | | |
| Phage- | 0.065 | 2.730 | 0.960 | 1093 |
| 871 | | | | |
| Phage- | 0.713 | 2.748 | 1.397 | 1094 |
| 872 | | | | |
| Phage- | 0.068 | 2.722 | 0.962 | 1095 |
| 873 | | | | |
| Phage- | 0.103 | 2.723 | 0.992 | 1096 |
| 874 | | | | |
| Phage- | 0.365 | 2.707 | 1.161 | 1097 |
| 875 | | | | |
| Phage- | 0.186 | 0.093 | 0.154 | 1098 |
| 876 | | | | |
| Phage- | 0.116 | 2.725 | 1.020 | 1099 |
| 877 | | | | |
| Phage- | 0.320 | 2.752 | 1.168 | 1100 |
| 878 | | | | |
| Phage- | 0.100 | 2.727 | 1.017 | 1101 |
| 879 | | | | |
| Phage- | 0.092 | 0.078 | 0.087 | 1102 |
| 880 | | | | |
| Phage- | 0.288 | 2.839 | 1.183 | 1103 |
| 881 | | | | |
| Phage- | 0.081 | 2.837 | 1.056 | 1104 |
| 882 | | | | |
| Phage- | 0.076 | 2.709 | 1.015 | 1105 |
| 883 | | | | |
| Phage- | 0.145 | 2.727 | 1.069 | 1106 |
| 884 | | | | |
| Phage- | 0.133 | 2.721 | 1.063 | 1107 |
| 885 | | | | |
| Phage- | 0.093 | 2.754 | 1.055 | 1108 |
| 886 | | | | |
| Phage- | 0.272 | 2.681 | 1.151 | 1109 |
| 887 | | | | |
| Phage- | 2.625 | 2.705 | 2.654 | 1110 |
| 888 | | | | |
| Phage- | 0.160 | 2.709 | 1.097 | 1111 |
| 889 | | | | |
| Phage- | 0.362 | 2.716 | 1.249 | 1112 |
| 890 | | | | |
| Phage- | 0.107 | 0.079 | 0.096 | 1113 |
| 891 | | | | |
| Phage- | 0.098 | 2.719 | 1.136 | 1114 |
| 892 | | | | |
| Phage- | 0.103 | 2.706 | 1.139 | 1115 |
| 893 | | | | |
| Phage- | 0.133 | 0.088 | 0.114 | 1116 |
| 894 | | | | |
| Phage- | 0.414 | 2.732 | 1.375 | 1117 |
| 895 | | | | |
| Phage- | 0.138 | 2.753 | 1.227 | 1118 |
| 896 | | | | |
| Phage- | 0.444 | 2.746 | 1.404 | 1119 |
| 897 | | | | |
| Phage- | 2.674 | 2.737 | 2.701 | 1120 |
| 898 | | | | |
| Phage- | 0.233 | 2.708 | 1.286 | 1121 |
| 899 | | | | |
| Phage- | 0.098 | 2.807 | 1.254 | 1122 |
| 900 | | | | |
| Phage- | 0.141 | 2.834 | 1.298 | 1123 |
| 901 | | | | |
| Phage- | 0.291 | 0.077 | 0.198 | 1124 |
| 902 | | | | |
| Phage- | 0.567 | 2.835 | 1.582 | 1125 |
| 903 | | | | |
| Phage- | 0.448 | 2.791 | 1.507 | 1126 |
| 904 | | | | |
| Phage- | 0.202 | 2.747 | 1.388 | 1127 |
| 905 | | | | |
| Phage- | 0.593 | 2.743 | 1.595 | 1128 |
| 906 | | | | |
| Phage- | 0.184 | 2.716 | 1.369 | 1129 |
| 907 | | | | |
| Phage- | 0.091 | 0.078 | 0.085 | 1130 |
| 908 | | | | |
| Phage- | 0.079 | 2.712 | 1.373 | 1131 |
| 909 | | | | |
| Phage- | 0.107 | 0.078 | 0.092 | 1132 |
| 910 | | | | |
| Phage- | 0.205 | 2.852 | 1.509 | 1133 |
| 911 | | | | |
| Phage- | 2.238 | 2.758 | 2.500 | 1134 |
| 912 | | | | |
| Phage- | 0.064 | 0.106 | 0.085 | 1135 |
| 913 | | | | |
| Phage- | 0.363 | 0.074 | 0.214 | 1136 |
| 914 | | | | |
| Phage- | 0.131 | 2.847 | 1.543 | 1137 |
| 915 | | | | |
| Phage- | 0.096 | 0.079 | 0.087 | 1138 |
| 916 | | | | |
| Phage- | 0.792 | 2.762 | 1.822 | 1139 |
| 917 | | | | |
| Phage- | 0.356 | 2.688 | 1.580 | 1140 |
| 918 | | | | |
| Phage- | 0.193 | 0.076 | 0.131 | 1141 |
| 919 | | | | |
| Phage- | 2.542 | 2.739 | 2.649 | 1142 |
| 920 | | | | |
| Phage- | 2.282 | 2.794 | 2.572 | 1143 |
| 921 | | | | |
| Phage- | 0.636 | 2.717 | 1.844 | 1144 |
| 922 | | | | |
| Phage- | 2.598 | 2.730 | 2.679 | 1145 |
| 923 | | | | |
| Phage- | 0.184 | 2.742 | 1.803 | 1146 |
| 924 | | | | |
| Phage- | 0.816 | 2.745 | 2.039 | 1147 |
| 925 | | | | |
| Phage- | 0.735 | 2.756 | 2.019 | 1148 |
| 926 | | | | |
| Phage- | 0.479 | 2.699 | 1.911 | 1149 |
| 927 | | | | |
| Phage- | 0.375 | 0.074 | 0.172 | 1150 |
| 928 | | | | |
| Phage- | 0.169 | 0.067 | 0.100 | 1151 |
| 929 | | | | |
| Phage- | 2.316 | 2.823 | 2.660 | 1152 |
| 930 | | | | |
| Phage- | 0.765 | 2.845 | 2.181 | 1153 |
| 931 | | | | |
| Phage- | 0.163 | 0.080 | 0.106 | 1154 |
| 932 | | | | |
| Phage- | 0.295 | 2.745 | 1.989 | 1155 |
| 933 | | | | |
| Phage- | 0.192 | 0.082 | 0.114 | 1156 |
| 934 | | | | |
| Phage- | 0.075 | 0.066 | 0.069 | 1157 |
| 935 | | | | |
| Phage- | 1.474 | 2.816 | 2.447 | 1158 |
| 936 | | | | |
| Phage- | 0.769 | 2.717 | 2.218 | 1159 |
| 937 | | | | |
| Phage- | 0.609 | 2.745 | 2.200 | 1160 |
| 938 | | | | |
| Phage- | 1.479 | 2.733 | 2.413 | 1161 |
| 939 | | | | |
| Phage- | 0.220 | 0.079 | 0.113 | 1162 |
| 940 | | | | |
| Phage- | 0.106 | 2.863 | 2.262 | 1163 |
| 941 | | | | |
| Phage- | 0.161 | 0.064 | 0.085 | 1164 |
| 942 | | | | |
| Phage- | 1.234 | 2.743 | 2.430 | 1165 |
| 943 | | | | |
| Phage- | 0.073 | 0.115 | 0.106 | 1166 |
| 944 | | | | |
| Phage- | 0.117 | 0.064 | 0.075 | 1167 |
| 945 | | | | |
| Phage- | 0.967 | 2.861 | 2.503 | 1168 |
| 946 | | | | |
| Phage- | 0.731 | 2.735 | 2.357 | 1169 |
| 947 | | | | |
| Phage- | 0.246 | 0.082 | 0.113 | 1170 |
| 948 | | | | |
| Phage- | 0.479 | 2.690 | 2.290 | 1171 |
| 949 | | | | |
| Phage- | 0.274 | 2.747 | 2.304 | 1172 |
| 950 | | | | |
| Phage- | 0.117 | 0.065 | 0.074 | 1173 |
| 951 | | | | |
| Phage- | 0.200 | 0.066 | 0.085 | 1174 |
| 952 | | | | |
| Phage- | 0.064 | 0.378 | 0.335 | 1175 |
| 953 | | | | |
| Phage- | 2.463 | 2.777 | 2.734 | 1176 |
| 954 | | | | |
| Phage- | 1.900 | 2.747 | 2.634 | 1177 |
| 955 | | | | |
| Phage- | 0.070 | 0.065 | 0.065 | 1178 |
| 956 | | | | |
| Phage- | 0.449 | 0.072 | 0.120 | 1179 |
| 957 | | | | |
| Phage- | 1.318 | 2.708 | 2.533 | 1180 |
| 958 | | | | |
| Phage- | 2.109 | 2.706 | 2.632 | 1181 |
| 959 | | | | |
| Phage- | 1.469 | 2.850 | 2.688 | 1182 |
| 960 | | | | |
| Phage- | 2.104 | 2.733 | 2.665 | 1183 |
| 961 | | | | |
| Phage- | 0.823 | 2.672 | 2.471 | 1184 |
| 962 | | | | |
| Phage- | 0.765 | 2.831 | 2.645 | 1185 |
| 963 | | | | |
| Phage- | 0.202 | 0.067 | 0.079 | 1186 |
| 964 | | | | |
| Phage- | 1.392 | 2.711 | 2.605 | 1187 |
| 965 | | | | |
| Phage- | 0.467 | 0.081 | 0.098 | 1188 |
| 966 | | | | |
| Phage- | 0.215 | 2.726 | 2.636 | 1189 |
| 967 | | | | |
| Phage- | 0.748 | 2.719 | 2.701 | 1190 |
| 968 | | | | |
| Phage- | 0.092 | 0.692 | 0.781 | 1191 |
| 969 | | | | |
| Phage- | 0.074 | 0.381 | 1.203 | 1192 |
| 970 | | | | |
| Phage- | 0.317 | 0.294 | 0.100 | 1193 |
| 971 | | | | |
| Phage- | 0.105 | 0.112 | 0.133 | 1194 |
| 972 | | | | |
| Phage- | 0.138 | 0.107 | 0.099 | 1195 |
| 973 | | | | |
| Phage- | 0.063 | 0.086 | 0.096 | 1196 |
| 974 | | | | |
| Phage- | 0.079 | 0.081 | 0.113 | 1197 |
| 975 | | | | |
| Phage- | 0.071 | 0.074 | 0.081 | 1198 |
| 976 | | | | |
| Phage- | 0.068 | 0.072 | 0.109 | 1199 |
| 977 | | | | |
| Phage- | 0.234 | 0.068 | 0.066 | 1200 |
| 978 | | | | |
| Phage- | 0.064 | 0.065 | 0.076 | 1201 |
| 979 | | | | |
| Phage- | 0.104 | 0.065 | 0.065 | 1202 |
| 980 | | | | |

TABLE 28
Sequences of those peptides selected for
synthesis (TROP2 Fab Peptide-1 Optimization)

| Construct | Amino | |
|---|---|---|
| Description | Acid Sequence | SEQ ID NO: |
| Peptide-30 | DALICVKNLFCWTS | 159 |
| Peptide-31 | DNLICVKNLWCWIA | 160 |
| Peptide-32 | DTLFCVKNLYCWIV | 161 |
| Peptide-33 | DTLSCFRNLYCWIT | 162 |
| Peptide-34 | DTLWCVKNLYCWVA | 163 |
| Peptide-35 | DVLFCVRNLYCWTS | 164 |
| Peptide-36 | FDLLCVRNLYCWNV | 165 |
| Peptide-37 | FSLVCVRNLYCWNV | 166 |
| Peptide-38 | FTLFCVQNLYCWNV | 167 |
| Peptide-39 | HDLQCFQNLFCWIV | 168 |
| Peptide-40 | LSLFCVKNLYCWNV | 169 |
| Peptide-41 | NYLLCVKNLYCWIV | 170 |
| Peptide-42 | STLECVRNLYCWIS | 171 |
| Peptide-43 | STLFCVKNLYCWVA | 172 |
| Peptide-44 | STLFCVRNLYCWTV | 173 |
| Peptide-45 | SYLVCVKNVYCWTA | 174 |
| Peptide-46 | TALFCFKNVYCWNV | 175 |
| Peptide-47 | TSLICFRNVYCWNV | 176 |
| Peptide-48 | YDLVCLRNLFCWTA | 177 |
| Peptide-49 | YSLVCVKNLYCWNL | 178 |

TABLE 29
Phage panning results of TROP2 Fab Peptide-2 library sequences.

| | | | | | | | | | | | | | | | Phage binding ELISA | | | |
|---|---|---|---|---|---|---|---|---|---|---|---|---|---|---|---|---|---|---|
| | | | | | | | | | | | | | | | | | TROP2 | |
| | | | | | | | | | | | | | | | | | Fab | |
| | | | | | | | | | | | | | | | | | signal in | |
| | | | | | | | | | | | | | | | | TROP2 | presence | SEQ |
| | Amino acid position sequence | | | | | | | | | | | | | | Backgroud | Fab | of | ID |
| Phage ID | 1 | 2 | 3 | 4 | 5 | 6 | 7 | 8 | 9 | 10 | 11 | 12 | 13 | 14 | signal | signal | TROP2 | NO: |
| Phage-981 | V | D | F | C | K | I | Y | S | W | P | V | C | H | Q | 0.055 | 2.832 | 0.067 | 24 |
| Phage-982 | I | — | — | — | A | M | — | Q | — | — | I | — | D | T | 0.058 | 2.945 | 0.064 | 179 |
| Phage-983 | I | — | — | — | A | V | — | K | — | — | — | — | Q | V | 0.059 | 2.885 | 0.064 | 180 |
| Phage-984 | I | — | — | — | M | L | — | N | — | — | I | — | A | G | 0.061 | 2.933 | 0.064 | 25 |
| Phage-985 | — | — | — | — | — | — | — | A | — | — | I | — | G | S | 0.066 | 2.868 | 0.068 | 182 |
| Phage-986 | — | — | — | — | — | L | — | N | — | — | — | — | Q | T | 0.061 | 2.874 | 0.067 | 183 |
| Phage-987 | I | — | — | — | L | — | — | N | — | — | — | — | D | T | 0.060 | 2.849 | 0.068 | 184 |
| Phage-988 | E | — | — | — | — | L | — | N | — | — | I | — | Y | — | 0.054 | 2.864 | 0.099 | 185 |
| Phage-989 | — | — | — | — | G | L | — | H | — | — | I | — | Y | — | 0.079 | 2.878 | 0.097 | 186 |
| Phage-990 | — | — | — | — | Y | L | — | N | — | — | — | — | S | K | 0.057 | 2.892 | 0.063 | 187 |
| Phage-991 | I | — | — | — | A | — | — | Q | — | — | — | — | R | S | 0.066 | 2.799 | 0.067 | 188 |
| Phage-992 | — | — | — | — | A | L | — | N | — | — | — | — | E | T | 0.056 | 2.752 | 0.058 | 189 |
| Phage-993 | P | — | — | — | A | V | — | R | — | — | I | — | Y | — | 0.062 | 2.746 | 0.073 | 190 |
| Phage-994 | — | — | — | — | E | L | — | R | — | — | I | — | N | S | 0.066 | 2.756 | 0.057 | 191 |
| Phage-995 | L | — | — | — | — | — | — | D | — | — | I | — | — | L | 0.082 | 2.760 | 0.083 | 192 |
| Phage-996 | L | — | — | — | — | L | — | Q | — | — | — | — | F | T | 0.080 | 2.763 | 0.079 | 193 |
| Phage-997 | I | — | — | — | L | L | — | D | — | — | — | — | A | S | 0.058 | 2.873 | 0.065 | 194 |
| Phage-998 | I | — | — | — | L | L | — | D | — | — | I | — | G | R | 0.170 | 2.774 | 0.205 | 195 |
| Phage-999 | M | — | — | — | Q | — | — | D | — | — | I | — | R | L | 0.057 | 2.589 | 0.062 | 196 |
| Phage-1000 | P | — | — | — | Q | L | — | N | — | — | — | — | A | G | 0.067 | 2.523 | 0.062 | 197 |
| Phage-1001 | — | — | — | — | S | F | — | R | — | — | I | — | E | T | 0.063 | 2.697 | 0.070 | 198 |
| Phage-1002 | I | — | — | — | S | L | — | Q | — | — | — | — | G | T | 0.063 | 2.828 | 0.091 | 199 |
| Phage-1003 | — | — | — | — | T | — | — | K | — | — | — | — | E | G | 0.055 | 2.760 | 0.059 | 200 |
| Phage-1004 | — | — | — | — | Y | Q | — | G | — | — | I | — | S | R | 0.060 | 2.696 | 0.060 | 201 |
| Phage-1005 | — | — | — | — | A | — | F | N | — | — | — | — | S | S | 0.063 | 2.742 | 0.068 | 1203 |
| Phage-1006 | L | — | — | — | A | — | — | K | — | — | — | — | F | E | 0.057 | 2.901 | 0.063 | 1204 |
| Phage-1007 | — | — | — | — | A | — | — | — | — | — | I | — | K | I | 0.066 | 2.834 | 0.064 | 1205 |
| Phage-1008 | I | — | — | — | A | — | — | P | — | — | I | — | D | T | 0.059 | 2.852 | 0.058 | 1206 |
| Phage-1009 | I | — | — | — | A | — | — | H | — | — | — | — | T | S | 0.057 | 2.707 | 0.063 | 1207 |
| Phage-1010 | I | — | — | — | A | — | — | Q | — | — | — | — | K | S | 0.108 | 2.810 | 0.096 | 1208 |
| Phage-1011 | M | — | — | — | A | — | — | H | — | — | — | — | N | Y | 0.061 | 2.760 | 0.062 | 1209 |
| Phage-1012 | E | — | — | — | A | — | — | R | — | — | — | — | L | T | 0.055 | 2.742 | 0.056 | 1210 |
| Phage-1013 | — | — | — | — | A | — | — | G | — | — | — | — | D | I | 0.068 | 1.940 | 0.067 | 1211 |
| Phage-1014 | F | — | — | — | A | — | — | R | — | — | — | — | Y | D | 0.072 | 1.407 | 0.080 | 1212 |
| Phage-1015 | — | — | — | — | A | K | — | E | — | — | I | — | S | T | 0.054 | 2.391 | 0.056 | 1213 |
| Phage-1016 | — | — | — | — | A | L | — | A | — | — | — | — | N | V | 0.060 | 2.810 | 0.057 | 1214 |
| Phage-1017 | I | — | — | — | A | L | — | — | — | — | — | — | N | S | 0.057 | 2.855 | 0.071 | 1215 |
| Phage-1018 | L | — | — | — | A | L | — | D | — | — | — | — | R | N | 0.062 | 2.717 | 0.069 | 1216 |
| Phage-1019 | — | — | — | — | A | L | — | H | — | — | — | — | G | L | 0.065 | 2.770 | 0.065 | 1217 |
| Phage-1020 | L | — | — | — | A | L | — | A | — | — | — | — | N | M | 0.059 | 2.649 | 0.071 | 1218 |
| Phage-1021 | L | — | — | — | A | L | N | A | — | — | — | — | N | M | 0.062 | 2.241 | 0.064 | 1219 |
| Phage-1022 | — | — | — | — | A | L | — | G | — | — | — | — | Y | L | 0.065 | 2.710 | 0.062 | 1220 |
| Phage-1023 | L | — | — | — | A | L | — | G | — | — | I | — | S | A | 0.055 | 2.208 | 0.059 | 1221 |
| Phage-1024 | — | — | — | — | A | L | — | N | — | — | — | — | Q | T | 0.061 | 2.848 | 0.059 | 1222 |
| Phage-1025 | I | — | — | — | A | L | — | R | — | — | — | — | Y | M | 0.136 | 2.760 | 0.148 | 1223 |
| Phage-1026 | — | — | — | — | A | L | — | E | — | — | I | — | M | M | 0.068 | 2.709 | 0.078 | 1224 |
| Phage-1027 | L | — | — | — | A | L | — | N | — | — | — | — | N | I | 0.063 | 2.625 | 0.073 | 1225 |
| Phage-1028 | — | — | — | — | A | L | — | N | — | — | — | — | D | T | 0.056 | 2.625 | 0.058 | 1226 |
| Phage-1029 | — | — | — | — | A | L | — | A | — | — | — | — | M | Y | 0.066 | 2.553 | 0.066 | 1227 |
| Phage-1030 | L | — | — | — | A | L | — | A | — | — | — | — | L | G | 0.059 | 2.401 | 0.064 | 1228 |
| Phage-1031 | — | — | — | — | A | L | F | E | — | — | I | — | G | A | 0.057 | 2.354 | 0.065 | 1229 |
| Phage-1032 | — | — | — | — | A | L | — | M | — | — | — | — | R | D | 0.066 | 2.270 | 0.073 | 1230 |
| Phage-1033 | — | — | W | — | A | L | — | K | — | — | — | — | S | T | 0.079 | 2.239 | 0.097 | 1231 |
| Phage-1034 | — | — | W | — | A | L | — | — | — | — | — | — | S | H | 0.069 | 2.091 | 0.070 | 1232 |
| Phage-1035 | L | G | — | — | A | L | N | G | — | — | I | — | S | A | 0.082 | 1.816 | 0.077 | 1233 |
| Phage-1036 | L | — | — | — | A | L | N | D | — | — | — | — | K | E | 0.055 | 1.662 | 0.062 | 1234 |
| Phage-1037 | I | — | — | — | A | L | — | G | — | — | — | — | D | T | 0.073 | 1.576 | 0.068 | 1235 |
| Phage-1038 | — | — | — | — | A | L | — | L | — | — | I | — | N | — | 0.054 | 1.567 | 0.062 | 1236 |
| Phage-1039 | — | — | — | — | A | L | — | M | — | — | — | — | Q | R | 0.055 | 1.464 | 0.059 | 1237 |
| Phage-1040 | L | — | — | — | A | L | N | G | — | — | I | — | S | A | 0.058 | 1.072 | 0.056 | 1238 |
| Phage-1041 | E | — | — | — | A | L | — | K | — | — | — | — | R | T | 0.059 | 0.658 | 0.059 | 1239 |
| Phage-1042 | I | — | — | — | A | M | — | H | — | — | — | — | D | T | 0.067 | 2.733 | 0.062 | 1240 |
| Phage-1043 | I | — | — | — | A | M | F | — | — | — | — | — | F | T | 0.085 | 2.836 | 0.082 | 1241 |
| Phage-1044 | — | — | — | — | A | M | — | H | — | — | I | — | Y | — | 0.062 | 2.771 | 0.067 | 1242 |
| Phage-1045 | 1 | — | — | — | A | M | — | Q | — | — | I | — | Y | T | 0.056 | 2.674 | 0.062 | 1243 |
| Phage-1046 | I | — | — | — | A | M | — | Q | — | — | I | — | V | A | 0.072 | 2.525 | 0.070 | 1244 |
| Phage-1047 | E | — | — | — | A | M | — | Y | — | — | I | — | G | L | 0.054 | 2.112 | 0.061 | 1245 |
| Phage-1048 | — | — | — | — | A | M | — | K | — | — | — | — | I | G | 0.081 | 2.053 | 0.066 | 1246 |
| Phage-1049 | I | — | — | — | A | M | — | Q | — | — | I | — | Q | T | 0.054 | 1.944 | 0.056 | 1247 |
| Phage-1050 | E | — | — | — | A | M | — | Q | — | — | — | — | I | T | 0.054 | 1.549 | 0.055 | 1248 |
| Phage-1051 | — | — | — | — | A | M | — | — | — | — | — | — | A | E | 0.056 | 1.123 | 0.058 | 1249 |
| Phage-1052 | L | — | — | — | A | M | — | D | — | — | — | — | G | P | 0.067 | 0.939 | 0.059 | 1250 |
| Phage-1053 | — | — | — | — | A | Q | — | G | — | — | I | — | V | T | 0.058 | 1.548 | 0.059 | 1251 |
| Phage-1054 | I | — | — | — | A | T | — | N | — | — | — | — | G | N | 0.055 | 2.674 | 0.056 | 1252 |
| Phage-1055 | — | — | — | — | A | T | — | G | — | — | — | — | F | T | 0.068 | 2.290 | 0.061 | 1253 |
| Phage-1056 | I | — | — | — | A | T | — | — | — | — | — | — | A | S | 0.057 | 2.083 | 0.056 | 1254 |
| Phage-1057 | W | T | — | — | A | T | S | M | — | R | Y | — | V | D | 0.150 | 1.312 | 0.226 | 1255 |
| Phage-1058 | W | K | — | — | A | T | S | M | — | R | Y | — | V | D | 0.130 | 2.690 | 0.194 | 1256 |
| Phage-1059 | — | — | — | — | A | V | — | E | — | — | I | — | R | H | 0.054 | 2.645 | 0.068 | 1257 |
| Phage-1060 | P | — | — | — | A | V | — | N | — | — | — | — | T | N | 0.055 | 2.628 | 0.058 | 1258 |
| Phage-1061 | — | — | — | — | A | V | — | K | — | — | — | — | L | E | 0.060 | 2.520 | 0.056 | 1259 |
| Phage-1062 | L | — | — | — | A | V | — | R | — | — | — | — | N | M | 0.059 | 2.380 | 0.062 | 1260 |
| Phage-1063 | — | — | — | — | A | V | — | K | — | — | — | — | S | I | 0.056 | 2.338 | 0.056 | 1261 |
| Phage-1064 | I | — | W | — | A | V | — | K | — | — | I | — | L | D | 0.067 | 2.277 | 0.075 | 1262 |
| Phage-1065 | — | — | — | — | A | V | — | G | — | — | — | — | Q | T | 0.065 | 2.139 | 0.075 | 1263 |
| Phage-1066 | I | — | — | — | A | V | — | K | — | — | — | — | A | R | 0.091 | 1.866 | 0.084 | 1264 |
| Phage-1067 | — | — | — | — | A | V | — | G | — | — | I | — | D | A | 0.056 | 1.853 | 0.056 | 1265 |
| Phage-1068 | L | V | — | — | A | V | — | D | — | — | — | — | S | N | 0.061 | 0.975 | 0.061 | 1266 |
| Phage-1069 | — | — | — | — | A | V | W | R | — | — | — | — | D | S | 0.058 | 0.154 | 0.060 | 1267 |
| Phage-1070 | I | — | — | — | A | V | — | N | — | — | — | — | G | S | 0.059 | 2.735 | 0.082 | 1268 |
| Phage-1071 | E | — | — | — | D | — | — | H | — | — | — | — | R | M | 0.099 | 1.583 | 0.064 | 1269 |
| Phage-1072 | — | — | — | — | D | L | — | R | — | — | I | — | L | L | 0.056 | 2.822 | 0.061 | 1270 |
| Phage-1073 | — | — | — | — | D | L | F | — | — | — | I | — | N | R | 0.067 | 1.993 | 0.077 | 1271 |
| Phage-1074 | — | — | — | — | D | L | — | D | — | — | — | — | S | T | 0.056 | 1.157 | 0.058 | 1272 |
| Phage-1075 | P | Y | — | — | D | M | — | N | — | — | — | — | V | T | 0.090 | 2.564 | 0.073 | 1273 |
| Phage-1076 | — | — | — | — | E | E | — | H | — | — | — | — | D | S | 0.056 | 1.112 | 0.057 | 1274 |
| Phage-1077 | I | — | — | — | E | — | — | R | — | — | — | — | S | R | 0.070 | 2.689 | 0.074 | 1275 |
| Phage-1078 | — | — | — | — | E | — | — | G | — | — | I | — | F | D | 0.055 | 2.696 | 0.055 | 1276 |
| Phage-1079 | I | — | — | — | E | — | — | — | — | — | — | — | I | — | 0.053 | 2.687 | 0.055 | 1277 |
| Phage-1080 | — | — | — | — | E | — | — | E | — | — | I | — | N | D | 0.054 | 2.634 | 0.060 | 1278 |
| Phage-1081 | P | N | — | — | E | — | — | R | — | — | — | — | N | V | 0.055 | 1.858 | 0.058 | 1279 |
| Phage-1082 | L | N | — | — | E | — | N | R | — | — | — | — | L | G | 0.060 | 0.701 | 0.064 | 1280 |
| Phage-1083 | I | — | — | — | E | K | — | Q | — | — | — | — | L | T | 0.056 | 1.625 | 0.056 | 1281 |
| Phage-1084 | F | — | — | — | E | K | — | K | — | — | I | — | I | P | 0.060 | 2.651 | 0.062 | 1282 |
| Phage-1085 | F | — | — | — | E | K | — | K | — | — | I | — | N | T | 0.057 | 2.236 | 0.057 | 1283 |
| Phage-1086 | I | — | — | — | E | L | — | Q | — | — | — | — | G | H | 0.055 | 2.700 | 0.057 | 1284 |
| Phage-1087 | — | — | — | — | E | L | — | K | — | — | — | — | F | K | 0.059 | 2.460 | 0.060 | 1285 |
| Phage-1088 | I | — | — | — | E | L | — | H | — | — | — | — | S | S | 0.057 | 2.767 | 0.062 | 1286 |
| Phage-1089 | — | — | — | — | E | L | — | K | — | — | — | — | M | G | 0.060 | 2.766 | 0.063 | 1287 |
| Phage-1090 | I | — | — | — | E | L | — | — | — | — | — | — | G | D | 0.068 | 2.530 | 0.092 | 1288 |
| Phage-1091 | — | — | — | — | E | L | — | H | — | — | — | — | D | — | 0.056 | 2.745 | 0.057 | 1289 |
| Phage-1092 | L | — | — | — | E | L | — | H | — | — | — | — | T | L | 0.076 | 2.684 | 0.065 | 1290 |
| Phage-1093 | — | — | — | — | E | L | — | — | — | — | — | — | Y | L | 0.060 | 2.753 | 0.058 | 1291 |
| Phage-1094 | I | — | — | — | E | L | — | H | — | — | — | — | K | W | 0.079 | 2.725 | 0.104 | 1292 |
| Phage-1095 | P | — | — | — | E | L | — | R | — | — | I | — | R | L | 0.071 | 2.364 | 0.073 | 1293 |
| Phage-1096 | — | — | — | — | E | L | — | R | — | — | — | — | M | I | 0.075 | 2.156 | 0.073 | 1294 |
| Phage-1097 | F | — | — | — | E | L | — | N | — | — | — | — | Q | S | 0.080 | 2.130 | 0.071 | 1295 |
| Phage-1098 | L | — | — | — | E | L | — | — | — | — | I | — | D | I | 0.056 | 2.093 | 0.064 | 1296 |
| Phage-1099 | — | — | — | — | E | L | — | E | — | — | I | — | F | K | 0.078 | 2.052 | 0.075 | 1297 |
| Phage-1100 | — | — | — | — | E | L | — | R | — | — | — | — | Y | K | 0.054 | 1.841 | 0.058 | 1298 |
| Phage-1101 | L | — | — | — | E | L | — | R | — | — | — | — | G | I | 0.062 | 1.329 | 0.056 | 1299 |
| Phage-1102 | — | — | — | — | E | L | — | R | — | — | — | — | N | G | 0.067 | 1.215 | 0.056 | 1300 |
| Phage-1103 | P | — | — | — | E | L | — | Q | — | — | — | — | D | R | 0.054 | 1.120 | 0.065 | 1301 |
| Phage-1104 | — | — | — | — | E | M | — | N | — | — | — | — | R | M | 0.057 | 2.726 | 0.055 | 1302 |
| Phage-1105 | L | — | — | — | E | M | — | G | — | — | — | — | K | V | 0.062 | 2.712 | 0.068 | 1303 |
| Phage-1106 | L | — | — | — | E | M | — | D | — | — | — | — | R | L | 0.056 | 1.989 | 0.059 | 1304 |
| Phage-1107 | L | — | — | — | E | M | — | N | — | — | — | — | K | D | 0.059 | 1.416 | 0.063 | 1305 |
| Phage-1108 | E | — | — | — | E | M | — | N | — | — | — | — | W | K | 0.055 | 1.334 | 0.057 | 1306 |
| Phage-1109 | — | — | — | — | E | M | — | R | — | — | — | — | A | S | 0.053 | 1.289 | 0.055 | 1307 |
| Phage-1110 | P | — | — | — | E | M | — | K | — | — | — | — | D | G | 0.054 | 1.244 | 0.055 | 1308 |
| Phage-1111 | — | — | — | — | E | V | — | H | — | — | — | — | Q | R | 0.058 | 2.621 | 0.057 | 1309 |
| Phage-1112 | — | — | — | — | E | V | — | H | — | — | — | — | D | R | 0.054 | 2.016 | 0.056 | 1310 |
| Phage-1113 | L | — | — | — | E | V | — | R | — | — | I | — | G | D | 0.062 | 0.064 | 0.052 | 1311 |
| Phage-1114 | — | — | — | — | F | — | — | — | — | — | — | — | T | E | 0.055 | 2.306 | 0.058 | 1312 |
| Phage-1115 | I | — | — | — | F | — | — | N | — | — | — | — | N | T | 0.259 | 2.747 | 0.192 | 1313 |
| Phage-1116 | L | — | W | — | F | — | — | N | — | — | — | — | Q | T | 0.158 | 2.720 | 0.155 | 1314 |
| Phage-1117 | — | — | — | — | F | L | — | — | — | — | — | — | S | T | 0.058 | 2.364 | 0.062 | 1315 |
| Phage-1118 | I | — | — | — | F | L | — | — | — | — | — | — | R | E | 0.061 | 2.181 | 0.059 | 1316 |
| Phage-1119 | I | — | — | — | F | L | — | R | — | — | — | — | S | S | 0.084 | 2.678 | 0.106 | 1317 |
| Phage-1120 | P | — | — | — | F | L | — | D | — | — | — | — | Y | E | 0.054 | 1.113 | 0.056 | 1318 |
| Phage-1121 | L | — | — | — | F | M | — | D | — | — | — | — | R | G | 0.056 | 2.678 | 0.060 | 1319 |
| Phage-1122 | — | — | — | — | F | M | F | H | — | — | — | — | A | E | 0.071 | 2.481 | 0.072 | 1320 |
| Phage-1123 | — | — | — | — | F | M | — | R | — | — | — | — | E | T | 0.065 | 1.765 | 0.058 | 1321 |
| Phage-1124 | E | — | — | — | F | M | — | T | — | — | — | — | — | N | 0.057 | 0.227 | 0.057 | 1322 |
| Phage-1125 | — | — | — | — | F | R | — | N | — | — | I | — | M | R | 0.065 | 2.265 | 0.070 | 1323 |
| Phage-1126 | — | — | — | — | F | R | — | G | — | — | — | — | G | T | 0.072 | 0.827 | 0.081 | 1324 |
| Phage-1127 | — | — | — | — | G | — | — | R | — | — | — | — | N | M | 0.059 | 2.526 | 0.062 | 1325 |
| Phage-1128 | — | — | — | — | G | — | — | R | — | — | — | — | M | T | 0.055 | 2.087 | 0.061 | 1326 |
| Phage-1129 | I | — | — | — | G | — | — | Q | — | — | I | — | — | N | 0.153 | 2.773 | 0.295 | 1327 |
| Phage-1130 | L | — | — | — | G | — | — | R | — | — | — | — | E | T | 0.060 | 2.310 | 0.059 | 1328 |
| Phage-1131 | — | — | — | — | G | L | — | N | — | — | — | — | A | S | 0.059 | 2.788 | 0.056 | 1329 |
| Phage-1132 | — | — | — | — | G | L | — | N | — | — | — | — | Q | E | 0.066 | 2.373 | 0.074 | 1330 |
| Phage-1133 | — | — | — | — | G | L | — | H | — | — | I | — | D | K | 0.083 | 2.723 | 0.081 | 1331 |
| Phage-1134 | — | — | — | — | G | L | — | N | — | — | I | — | A | T | 0.056 | 1.438 | 0.057 | 1332 |
| Phage-1135 | — | — | — | — | G | L | — | R | — | — | — | — | N | — | 0.055 | 0.872 | 0.056 | 1333 |
| Phage-1136 | E | — | — | — | G | M | — | H | — | — | — | — | D | I | 0.075 | 1.887 | 0.058 | 1334 |
| Phage-1137 | I | — | — | — | G | M | — | E | — | — | I | — | E | M | 0.054 | 1.827 | 0.062 | 1335 |
| Phage-1138 | E | — | — | — | G | M | — | H | — | — | I | — | S | G | 0.057 | 1.626 | 0.060 | 1336 |
| Phage-1139 | — | — | — | — | G | M | — | H | — | — | I | — | Y | K | 0.083 | 2.731 | 0.097 | 1337 |
| Phage-1140 | F | — | — | — | G | T | — | H | — | — | — | — | E | S | 0.067 | 2.212 | 0.061 | 1338 |
| Phage-1141 | I | — | — | — | G | V | — | K | — | — | — | — | T | L | 0.066 | 1.604 | 0.061 | 1339 |
| Phage-1142 | — | E | — | — | H | L | — | N | — | — | I | — | S | K | 0.059 | 2.849 | 0.061 | 1340 |
| Phage-1143 | — | — | — | — | H | M | — | R | — | — | — | — | D | M | 0.062 | 2.419 | 0.060 | 1341 |
| Phage-1144 | — | — | — | — | I | — | — | N | — | — | — | — | R | D | 0.075 | 2.649 | 0.074 | 1342 |
| Phage-1145 | I | — | — | — | I | L | — | D | — | — | — | — | E | M | 0.057 | 1.498 | 0.056 | 1343 |
| Phage-1146 | — | — | — | — | — | E | — | N | — | — | I | — | S | D | 0.071 | 2.476 | 0.070 | 1344 |
| Phage-1147 | I | — | — | — | — | E | — | — | — | — | I | — | L | N | 0.078 | 1.470 | 0.079 | 1345 |
| Phage-1148 | L | — | — | — | — | — | — | D | — | — | I | — | G | H | 0.076 | 2.670 | 0.084 | 1346 |
| Phage-1149 | — | — | — | — | — | — | — | — | — | — | — | — | S | N | 0.064 | 2.623 | 0.063 | 1347 |
| Phage-1150 | L | — | — | — | — | — | N | D | — | — | I | — | — | L | 0.063 | 2.436 | 0.078 | 1348 |
| Phage-1151 | — | — | — | — | — | — | — | E | — | — | I | — | R | M | 0.055 | 2.418 | 0.066 | 1349 |
| Phage-1152 | L | — | — | — | — | — | — | G | — | — | — | — | Y | T | 0.064 | 1.291 | 0.060 | 1350 |
| Phage-1153 | I | — | — | — | — | L | — | E | — | — | — | — | F | I | 0.079 | 2.696 | 0.090 | 1351 |
| Phage-1154 | P | — | — | — | — | L | N | K | — | — | — | — | I | — | 0.064 | 2.291 | 0.066 | 1352 |
| Phage-1155 | — | — | — | — | — | L | — | H | — | — | — | — | T | G | 0.062 | 2.216 | 0.074 | 1353 |
| Phage-1156 | — | — | — | — | — | L | — | K | — | — | — | — | E | G | 0.060 | 2.201 | 0.062 | 1354 |
| Phage-1157 | P | — | — | — | — | L | — | Q | — | — | I | — | V | R | 0.058 | 2.201 | 0.059 | 1355 |
| Phage-1158 | L | — | — | — | — | L | — | H | — | — | — | — | R | D | 0.065 | 2.118 | 0.068 | 1356 |
| Phage-1159 | — | E | — | — | — | L | — | Q | — | — | I | — | Q | S | 0.056 | 1.273 | 0.064 | 1357 |
| Phage-1160 | L | — | — | — | — | L | — | H | — | — | — | — | S | D | 0.071 | 1.062 | 0.075 | 1358 |
| Phage-1161 | — | — | — | — | — | M | — | A | — | — | — | — | K | L | 0.056 | 2.162 | 0.063 | 1359 |
| Phage-1162 | — | — | — | — | — | M | — | A | — | — | — | — | E | M | 0.081 | 2.518 | 0.071 | 1360 |
| Phage-1163 | — | — | — | — | — | M | F | A | — | — | — | — | N | T | 0.084 | 2.476 | 0.093 | 1361 |
| Phage-1164 | M | — | — | — | — | M | — | R | — | — | I | — | G | M | 0.067 | 2.340 | 0.072 | 1362 |
| Phage-1165 | — | — | — | — | — | M | — | D | — | — | — | — | T | N | 0.067 | 1.732 | 0.074 | 1363 |
| Phage-1166 | F | — | — | — | — | M | — | D | — | — | — | — | R | L | 0.089 | 1.728 | 0.092 | 1364 |
| Phage-1167 | I | N | — | — | — | M | — | E | — | — | I | — | S | T | 0.067 | 1.694 | 0.064 | 1365 |
| Phage-1168 | — | — | — | — | — | V | — | N | — | — | — | — | W | L | 0.119 | 2.605 | 0.143 | 1366 |
| Phage-1169 | I | — | — | — | — | V | F | A | — | — | — | — | T | A | 0.096 | 2.212 | 0.097 | 1367 |
| Phage-1170 | I | — | — | — | L | — | — | Q | — | — | I | — | V | N | 0.060 | 2.883 | 0.062 | 1368 |
| Phage-1171 | — | — | — | — | L | — | — | Q | — | — | — | — | N | S | 0.054 | 2.722 | 0.057 | 1369 |
| Phage-1172 | I | — | — | — | L | — | — | N | — | — | — | — | Y | T | 0.060 | 2.581 | 0.065 | 1370 |
| Phage-1173 | — | — | — | — | L | — | — | K | — | — | — | — | G | L | 0.055 | 2.117 | 0.062 | 1371 |
| Phage-1174 | I | — | — | — | L | — | — | E | — | — | — | — | T | A | 0.066 | 2.039 | 0.076 | 1372 |
| Phage-1175 | — | — | — | — | L | K | — | N | — | — | — | — | D | G | 0.078 | 0.436 | 0.073 | 1373 |
| Phage-1176 | L | — | — | — | L | L | — | D | — | — | — | — | Q | T | 0.055 | 2.588 | 0.057 | 1374 |
| Phage-1177 | I | — | — | — | L | L | — | K | — | — | — | — | E | L | 0.056 | 2.770 | 0.060 | 1375 |
| Phage-1178 | L | N | — | — | L | L | — | D | — | — | — | — | A | S | 0.072 | 1.096 | 0.079 | 1376 |
| Phage-1179 | — | — | — | — | L | L | — | E | — | — | — | — | N | L | 0.054 | 0.629 | 0.066 | 1377 |
| Phage-1180 | I | — | — | — | L | M | — | N | — | — | — | — | T | T | 0.061 | 2.759 | 0.061 | 1378 |
| Phage-1181 | — | — | — | — | L | M | — | Q | — | — | I | — | — | M | 0.057 | 2.774 | 0.062 | 1379 |
| Phage-1182 | I | — | — | — | L | M | — | H | — | — | — | — | Y | E | 0.058 | 2.766 | 0.068 | 1380 |
| Phage-1183 | I | — | — | — | L | M | — | N | — | — | — | — | M | S | 0.055 | 2.384 | 0.058 | 1381 |
| Phage-1184 | L | — | — | — | L | M | — | K | — | — | — | — | D | F | 0.082 | 2.134 | 0.073 | 1382 |
| Phage-1185 | I | — | — | — | L | M | — | — | — | — | — | — | T | A | 0.082 | 1.634 | 0.086 | 1383 |
| Phage-1186 | I | N | — | — | L | V | — | D | — | — | — | — | K | — | 0.061 | 2.403 | 0.067 | 1384 |
| Phage-1187 | F | — | — | — | L | V | — | — | — | — | — | — | N | S | 0.059 | 1.424 | 0.061 | 1385 |
| Phage-1188 | I | — | — | — | L | V | — | N | — | — | — | — | R | S | 0.053 | 0.659 | 0.063 | 1386 |
| Phage-1189 | L | — | — | — | L | W | — | K | — | — | — | — | E | — | 0.168 | 2.176 | 0.226 | 1387 |
| Phage-1190 | I | — | — | — | M | F | — | E | — | — | I | — | G | T | 0.062 | 2.678 | 0.058 | 1388 |
| Phage-1191 | L | V | — | — | M | F | N | N | — | — | — | — | Q | H | 0.054 | 0.062 | 0.054 | 1389 |
| Phage-1192 | M | — | — | — | M | — | — | N | — | — | — | — | A | — | 0.057 | 2.791 | 0.056 | 1390 |
| Phage-1193 | L | — | — | — | M | — | — | A | — | — | I | — | A | — | 0.057 | 2.522 | 0.070 | 1391 |
| Phage-1194 | I | — | — | — | M | — | — | R | — | — | — | — | Q | V | 0.091 | 2.729 | 0.089 | 1392 |
| Phage-1195 | L | — | — | — | M | — | — | K | — | — | I | — | K | G | 0.072 | 2.621 | 0.086 | 1393 |
| Phage-1196 | L | — | — | — | M | — | N | D | — | — | — | — | S | K | 0.055 | 1.578 | 0.057 | 1394 |
| Phage-1197 | — | — | — | — | M | L | — | K | — | — | I | — | K | T | 0.068 | 2.714 | 0.078 | 1395 |
| Phage-1198 | — | — | — | — | M | L | — | N | — | — | — | — | M | E | 0.105 | 2.751 | 0.056 | 1396 |
| Phage-1199 | I | — | — | — | M | L | — | Q | — | — | — | — | — | K | 0.081 | 2.496 | 0.090 | 1397 |
| Phage-1200 | I | — | — | — | M | L | — | A | — | — | — | — | N | S | 0.058 | 1.542 | 0.065 | 1398 |
| Phage-1201 | — | — | — | — | M | L | — | — | — | — | — | — | L | T | 0.059 | 0.073 | 0.061 | 1399 |
| Phage-1202 | I | — | — | — | M | L | — | N | — | — | I | — | A | E | 0.094 | 2.803 | 0.145 | 1400 |
| Phage-1203 | P | — | — | — | M | M | — | D | — | — | — | — | R | I | 0.117 | 2.260 | 0.059 | 1401 |
| Phage-1204 | F | V | — | — | N | — | L | A | M | R | N | — | V | S | 0.055 | 2.712 | 1.924 | 1402 |
| Phage-1205 | — | — | — | — | N | — | — | N | — | — | — | — | L | D | 0.054 | 2.166 | 0.060 | 1403 |
| Phage-1206 | — | — | — | — | N | L | — | N | — | — | — | — | Q | N | 0.083 | 2.488 | 0.063 | 1404 |
| Phage-1207 | Y | W | L | — | N | Q | G | K | — | L | A | — | E | — | 0.067 | 0.068 | 0.086 | 1405 |
| Phage-1208 | F | V | L | — | N | T | L | T | M | R | E | — | V | S | 0.065 | 1.426 | 2.552 | 1406 |
| Phage-1209 | I | — | — | — | N | V | — | D | — | — | — | — | R | T | 0.055 | 2.663 | 0.061 | 1407 |
| Phage-1210 | — | T | — | — | P | T | S | Q | — | R | Y | — | I | I | 0.063 | 0.102 | 0.090 | 1408 |
| Phage-1211 | I | — | — | — | Q | E | — | N | — | — | — | — | V | N | 0.056 | 2.141 | 0.058 | 1409 |
| Phage-1212 | — | — | — | — | Q | — | — | — | — | — | — | — | N | W | 0.060 | 2.336 | 0.062 | 1410 |
| Phage-1213 | — | — | — | — | Q | — | — | K | — | — | — | — | E | — | 0.060 | 2.583 | 0.060 | 1411 |
| Phage-1214 | — | — | — | — | Q | — | — | N | — | — | — | — | T | D | 0.059 | 2.573 | 0.057 | 1412 |
| Phage-1215 | F | — | — | — | Q | — | — | N | — | — | I | — | G | R | 0.081 | 1.795 | 0.093 | 1413 |
| Phage-1216 | — | — | — | — | Q | — | — | A | — | — | — | — | G | N | 0.058 | 1.796 | 0.065 | 1414 |
| Phage-1217 | N | E | Q | — | Q | — | — | I | M | A | — | — | R | A | 0.074 | 0.065 | 0.074 | 1415 |
| Phage-1218 | — | — | — | — | Q | L | — | H | — | — | — | — | N | A | 0.056 | 2.830 | 0.062 | 1416 |
| Phage-1219 | P | — | — | — | Q | L | N | N | — | — | — | — | A | G | 0.062 | 2.428 | 0.057 | 1417 |
| Phage-1220 | — | — | — | — | Q | L | — | A | — | — | — | — | G | T | 0.056 | 2.428 | 0.057 | 1418 |
| Phage-1221 | I | — | — | — | Q | L | — | — | — | — | — | — | V | N | 0.062 | 2.046 | 0.058 | 1419 |
| Phage-1222 | L | — | — | — | Q | L | — | R | — | — | — | — | E | V | 0.060 | 1.887 | 0.059 | 1420 |
| Phage-1223 | — | — | — | — | Q | L | — | R | — | — | — | — | G | N | 0.067 | 1.583 | 0.062 | 1421 |
| Phage-1224 | — | — | W | — | Q | L | — | N | — | — | — | — | R | E | 0.060 | 0.211 | 0.074 | 1422 |
| Phage-1225 | — | — | — | — | Q | M | — | D | — | — | I | — | M | A | 0.063 | 2.464 | 0.063 | 1423 |
| Phage-1226 | I | — | — | — | Q | M | — | — | — | — | — | — | G | — | 0.069 | 2.089 | 0.069 | 1424 |
| Phage-1227 | — | — | — | — | Q | M | — | M | — | — | — | — | L | S | 0.243 | 2.619 | 0.257 | 1425 |
| Phage-1228 | I | — | — | — | Q | V | — | — | — | — | — | — | E | — | 0.054 | 2.449 | 0.055 | 1426 |
| Phage-1229 | M | — | — | — | Q | V | — | A | — | — | — | — | N | M | 0.054 | 2.130 | 0.057 | 1427 |
| Phage-1230 | — | — | — | — | Q | V | — | N | — | — | — | — | L | S | 0.057 | 1.133 | 0.057 | 1428 |
| Phage-1231 | L | — | — | — | Q | V | — | N | — | — | I | — | A | W | 0.065 | 0.720 | 0.074 | 1429 |
| Phage-1232 | L | E | S | — | Q | V | — | E | — | H | G | — | G | A | 0.066 | 0.059 | 0.059 | 1430 |
| Phage-1233 | I | — | — | — | R | E | — | N | — | — | — | — | S | W | 0.072 | 1.660 | 0.076 | 1431 |
| Phage-1234 | — | — | — | — | R | F | — | D | — | — | — | — | D | T | 0.055 | 1.646 | 0.063 | 1432 |
| Phage-1235 | L | — | — | — | R | — | — | R | — | — | — | — | E | T | 0.070 | 1.819 | 0.063 | 1433 |
| Phage-1236 | — | — | — | — | R | — | — | H | — | — | — | — | E | D | 0.065 | 2.723 | 0.062 | 1434 |
| Phage-1237 | — | — | — | — | R | — | — | Q | — | — | — | — | G | S | 0.053 | 0.345 | 0.054 | 1435 |
| Phage-1238 | — | — | — | — | R | — | — | N | — | — | — | — | I | N | 0.078 | 2.287 | 0.079 | 1436 |
| Phage-1239 | — | — | — | — | R | — | — | Q | — | — | — | — | T | Y | 0.059 | 1.675 | 0.061 | 1437 |
| Phage-1240 | — | — | — | — | R | — | — | — | — | — | — | — | T | L | 0.059 | 1.442 | 0.061 | 1438 |
| Phage-1241 | L | — | — | — | R | — | — | N | — | — | — | — | A | R | 0.090 | 1.189 | 0.092 | 1439 |
| Phage-1242 | L | — | — | — | R | — | N | D | — | — | — | — | Q | S | 0.061 | 0.899 | 0.056 | 1440 |
| Phage-1243 | — | — | — | — | R | L | — | H | — | — | — | — | G | D | 0.076 | 2.276 | 0.076 | 1441 |
| Phage-1244 | I | — | — | — | R | L | — | D | — | — | — | — | G | L | 0.067 | 2.435 | 0.062 | 1442 |
| Phage-1245 | — | — | — | — | R | L | — | D | — | — | — | — | Q | D | 0.054 | 1.729 | 0.056 | 1443 |
| Phage-1246 | — | — | W | — | R | L | — | Q | — | — | — | — | Y | — | 0.255 | 2.541 | 0.334 | 1444 |
| Phage-1247 | I | — | — | — | R | L | — | N | — | — | I | — | P | G | 0.072 | 2.698 | 0.089 | 1445 |
| Phage-1248 | L | — | — | — | R | L | — | K | — | — | I | — | S | V | 0.226 | 2.666 | 0.267 | 1446 |
| Phage-1249 | L | — | — | — | R | L | — | N | — | — | — | — | S | M | 0.107 | 2.576 | 0.124 | 1447 |
| Phage-1250 | L | — | — | — | R | L | — | N | — | — | — | — | G | V | 0.081 | 2.527 | 0.073 | 1448 |
| Phage-1251 | — | — | — | — | R | L | — | N | — | — | — | — | S | V | 0.056 | 2.276 | 0.059 | 1449 |
| Phage-1252 | — | — | — | — | R | L | — | — | — | — | — | — | Q | E | 0.059 | 2.032 | 0.059 | 1450 |
| Phage-1253 | — | — | — | — | R | L | — | T | — | — | I | — | Q | S | 0.074 | 1.979 | 0.102 | 1451 |
| Phage-1254 | P | — | — | — | R | L | — | D | — | — | — | — | A | K | 0.065 | 1.823 | 0.057 | 1452 |
| Phage-1255 | L | — | — | — | R | L | N | D | — | — | — | — | Q | T | 0.056 | 1.551 | 0.070 | 1453 |
| Phage-1256 | — | — | — | — | R | L | — | D | — | — | — | — | I | E | 0.078 | 0.978 | 0.074 | 1454 |
| Phage-1257 | I | — | W | — | R | M | — | E | — | — | — | — | K | H | 0.080 | 1.130 | 0.098 | 1455 |
| Phage-1258 | — | — | — | — | R | V | — | N | — | — | — | — | Q | V | 0.067 | 2.726 | 0.069 | 1456 |
| Phage-1259 | I | — | — | — | R | V | — | E | — | — | I | — | Y | G | 0.056 | 2.433 | 0.058 | 1457 |
| Phage-1260 | I | — | — | — | R | V | — | D | — | — | — | — | N | R | 0.063 | 2.155 | 0.056 | 1458 |
| Phage-1261 | I | — | — | — | R | V | — | D | — | — | — | — | N | W | 0.084 | 2.489 | 0.079 | 1459 |
| Phage-1262 | D | W | — | — | R | V | — | — | — | — | I | — | Q | D | 0.316 | 2.348 | 0.404 | 1460 |
| Phage-1263 | I | — | — | — | R | V | — | — | — | — | — | — | G | T | 0.059 | 1.879 | 0.055 | 1461 |
| Phage-1264 | — | — | W | — | R | Y | — | D | — | — | — | — | S | T | 0.075 | 0.652 | 0.095 | 1462 |
| Phage-1265 | — | — | — | — | S | — | — | H | — | — | — | — | Y | V | 0.067 | 2.862 | 0.078 | 1463 |
| Phage-1266 | — | — | — | — | S | — | — | R | — | — | — | — | T | G | 0.065 | 1.384 | 0.068 | 1464 |
| Phage-1267 | I | — | — | — | S | — | — | — | — | — | — | — | R | H | 0.072 | 2.321 | 0.105 | 1465 |
| Phage-1268 | L | — | — | — | S | — | N | D | — | — | — | — | N | V | 0.061 | 1.436 | 0.059 | 1466 |
| Phage-1269 | I | — | W | — | S | L | — | A | — | — | — | — | E | L | 0.066 | 2.508 | 0.069 | 1467 |
| Phage-1270 | E | — | — | — | S | L | — | K | — | — | I | — | N | S | 0.073 | 2.525 | 0.089 | 1468 |
| Phage-1271 | — | — | — | — | S | L | — | D | — | — | — | — | N | — | 0.055 | 2.115 | 0.053 | 1469 |
| Phage-1272 | F | — | — | — | S | L | — | K | — | — | — | — | E | T | 0.059 | 1.805 | 0.068 | 1470 |
| Phage-1273 | — | — | — | — | S | L | — | D | — | — | — | — | S | G | 0.053 | 2.153 | 0.057 | 1471 |
| Phage-1274 | — | — | — | — | S | L | — | N | — | — | — | — | Q | N | 0.059 | 2.725 | 0.063 | 1472 |
| Phage-1275 | — | — | — | — | S | L | — | N | — | — | — | — | K | M | 0.059 | 2.714 | 0.064 | 1473 |
| Phage-1276 | I | — | — | — | S | L | — | — | — | — | — | — | M | S | 0.056 | 2.694 | 0.056 | 1474 |
| Phage-1277 | — | — | — | — | S | L | — | N | — | — | — | — | M | R | 0.082 | 2.694 | 0.090 | 1475 |
| Phage-1278 | — | — | — | — | S | L | — | H | — | — | — | — | M | — | 0.058 | 2.653 | 0.062 | 1476 |
| Phage-1279 | — | — | — | — | S | L | — | Q | — | — | — | — | D | V | 0.080 | 2.335 | 0.077 | 1477 |
| Phage-1280 | I | — | — | — | S | L | — | K | — | — | I | — | G | A | 0.056 | 2.197 | 0.060 | 1478 |
| Phage-1281 | M | — | — | — | S | L | — | N | — | — | — | — | R | L | 0.071 | 1.469 | 0.067 | 1479 |
| Phage-1282 | L | — | — | — | S | L | — | A | — | — | I | — | A | K | 0.063 | 1.323 | 0.067 | 1480 |
| Phage-1283 | — | — | — | — | S | L | — | D | — | — | — | — | L | S | 0.062 | 1.281 | 0.060 | 1481 |
| Phage-1284 | I | — | — | — | S | L | — | K | — | — | I | — | G | G | 0.065 | 2.760 | 0.086 | 1482 |
| Phage-1285 | — | — | — | — | S | M | — | N | — | — | — | — | A | R | 0.054 | 2.428 | 0.067 | 1483 |
| Phage-1286 | — | — | — | — | S | M | — | N | — | — | — | — | V | — | 0.059 | 2.611 | 0.061 | 1484 |
| Phage-1287 | L | — | — | — | S | M | — | H | — | — | — | — | G | D | 0.057 | 2.570 | 0.056 | 1485 |
| Phage-1288 | L | — | — | — | S | M | — | N | — | — | — | — | R | E | 0.057 | 2.200 | 0.062 | 1486 |
| Phage-1289 | — | — | — | — | S | M | — | Q | — | — | — | — | D | G | 0.074 | 1.991 | 0.073 | 1487 |
| Phage-1290 | — | — | — | — | S | M | — | M | — | — | — | — | Y | — | 0.057 | 1.808 | 0.072 | 1488 |
| Phage-1291 | L | — | — | — | S | M | — | D | — | — | — | — | A | R | 0.058 | 0.939 | 0.059 | 1489 |
| Phage-1292 | P | — | — | — | S | M | — | Q | — | — | — | — | Q | E | 0.081 | 0.409 | 0.064 | 1490 |
| Phage-1293 | — | — | — | — | S | M | — | A | — | — | — | — | K | T | 0.053 | 0.327 | 0.065 | 1491 |
| Phage-1294 | I | — | — | — | S | V | — | N | — | — | — | — | D | P | 0.081 | 2.329 | 0.069 | 1492 |
| Phage-1295 | M | — | — | — | S | V | — | Q | — | — | I | — | G | S | 0.070 | 2.495 | 0.089 | 1493 |
| Phage-1296 | — | — | — | — | S | V | — | Q | — | — | I | — | Y | K | 0.060 | 1.925 | 0.065 | 1494 |
| Phage-1297 | — | — | W | — | S | V | — | D | — | — | — | — | R | — | 0.057 | 0.453 | 0.059 | 1495 |
| Phage-1298 | L | — | — | — | S | Y | — | D | — | — | — | — | R | T | 0.058 | 2.921 | 0.065 | 1496 |
| Phage-1299 | L | — | — | — | T | F | — | D | — | — | — | — | I | G | 0.057 | 0.658 | 0.058 | 1497 |
| Phage-1300 | — | — | — | — | T | — | — | H | — | — | — | — | F | T | 0.062 | 2.800 | 0.064 | 1498 |
| Phage-1301 | L | — | — | — | T | — | — | N | — | — | I | — | N | R | 0.060 | 0.955 | 0.058 | 1499 |
| Phage-1302 | L | — | — | — | T | L | — | K | — | — | — | — | K | I | 0.064 | 1.606 | 0.066 | 1500 |
| Phage-1303 | — | — | — | — | T | L | — | H | — | — | — | — | T | V | 0.069 | 1.880 | 0.088 | 1501 |
| Phage-1304 | I | — | — | — | T | M | — | H | — | — | I | — | D | T | 0.057 | 2.853 | 0.066 | 1502 |
| Phage-1305 | L | — | — | — | T | M | — | D | — | — | — | — | G | H | 0.055 | 2.583 | 0.065 | 1503 |
| Phage-1306 | I | — | — | — | T | M | — | Q | — | — | I | — | D | T | 0.076 | 2.761 | 0.071 | 1504 |
| Phage-1307 | — | — | — | — | T | V | — | N | — | — | — | — | Q | T | 0.061 | 2.843 | 0.059 | 1505 |
| Phage-1308 | I | — | — | — | T | V | — | K | — | — | — | — | Q | I | 0.059 | 2.833 | 0.074 | 1506 |
| Phage-1309 | — | — | — | — | T | V | — | R | — | — | I | — | S | N | 0.059 | 2.799 | 0.081 | 1507 |
| Phage-1310 | F | — | — | — | T | V | — | — | — | — | — | — | R | — | 0.058 | 0.385 | 0.062 | 1508 |
| Phage-1311 | L | — | L | — | T | V | Q | — | G | — | — | — | R | S | 0.055 | 0.056 | 0.056 | 1509 |
| Phage-1312 | I | — | — | — | V | — | — | H | — | — | — | — | R | R | 0.058 | 2.750 | 0.064 | 1510 |
| Phage-1313 | I | — | — | — | V | L | — | D | — | — | — | — | Q | G | 0.054 | 2.606 | 0.060 | 1511 |
| Phage-1314 | L | — | — | — | V | L | — | R | — | — | I | — | S | T | 0.072 | 2.459 | 0.072 | 1512 |
| Phage-1315 | — | — | — | — | V | V | — | Q | — | — | I | — | G | — | 0.056 | 2.367 | 0.074 | 1513 |
| Phage-1316 | — | — | — | — | W | — | — | R | — | — | — | — | L | A | 0.467 | 2.853 | 0.514 | 1514 |
| Phage-1317 | — | — | — | — | W | — | — | E | — | — | I | — | L | N | 0.059 | 2.146 | 0.070 | 1515 |
| Phage-1318 | T | — | — | — | W | — | — | D | — | — | — | — | — | — | 0.055 | 0.474 | 0.067 | 1516 |
| Phage-1319 | — | — | — | — | W | L | — | K | — | — | — | — | F | — | 0.288 | 2.659 | 0.327 | 1517 |
| Phage-1320 | — | — | — | — | W | L | — | K | — | — | — | — | E | N | 0.065 | 1.993 | 0.062 | 1518 |
| Phage-1321 | E | — | — | — | W | L | — | K | — | — | — | — | T | L | 0.060 | 1.750 | 0.057 | 1519 |
| Phage-1322 | — | — | — | — | W | L | — | E | — | — | — | — | Q | N | 0.055 | 1.633 | 0.060 | 1520 |
| Phage-1323 | — | — | — | — | W | M | — | D | — | — | — | — | R | E | 0.055 | 2.656 | 0.064 | 1521 |
| Phage-1324 | E | — | — | — | W | M | — | A | — | — | — | — | G | I | 0.059 | 1.958 | 0.062 | 1522 |
| Phage-1325 | — | — | — | — | Y | E | — | D | — | — | — | — | — | T | 0.057 | 0.797 | 0.059 | 1523 |
| Phage-1326 | P | — | — | — | Y | — | N | N | — | — | — | — | V | T | 0.057 | 2.321 | 0.057 | 1524 |
| Phage-1327 | P | — | — | — | Y | — | — | K | — | — | I | — | T | E | 0.065 | 2.157 | 0.064 | 1525 |
| Phage-1328 | I | — | — | — | Y | — | — | D | — | — | — | — | Y | T | 0.056 | 2.157 | 0.068 | 1526 |
| Phage-1329 | L | — | — | — | Y | — | N | K | — | — | — | — | W | E | 0.057 | 1.901 | 0.076 | 1527 |
| Phage-1330 | — | — | — | — | Y | L | — | — | — | — | I | — | T | K | 0.063 | 2.858 | 0.062 | 1528 |
| Phage-1331 | — | — | — | — | Y | L | F | N | — | — | — | — | W | E | 0.150 | 2.833 | 0.134 | 1529 |
| Phage-1332 | — | — | — | — | Y | L | — | D | — | — | — | — | N | S | 0.053 | 2.601 | 0.064 | 1530 |
| Phage-1333 | — | — | — | — | Y | L | — | — | — | — | — | — | V | — | 0.088 | 2.495 | 0.073 | 1531 |
| Phage-1334 | — | — | — | — | Y | L | F | D | — | — | — | — | P | N | 0.073 | 2.620 | 0.078 | 1532 |
| Phage-1335 | F | — | — | — | Y | L | — | D | — | — | — | — | W | G | 0.066 | 2.600 | 0.075 | 1533 |
| Phage-1336 | M | — | — | — | Y | L | — | R | — | — | I | — | G | M | 0.071 | 1.341 | 0.075 | 1534 |
| Phage-1337 | P | — | — | — | Y | M | — | N | — | — | — | — | V | T | 0.070 | 2.778 | 0.072 | 1535 |
| Phage-1338 | P | — | — | — | Y | M | — | G | — | — | I | — | D | S | 0.055 | 2.835 | 0.056 | 1536 |
| Phage-1339 | — | — | — | — | Y | M | — | R | — | — | — | — | L | N | 0.063 | 2.740 | 0.076 | 1537 |
| Phage-1340 | P | — | — | — | Y | M | — | R | — | — | — | — | M | S | 0.059 | 2.646 | 0.063 | 1538 |
| Phage-1341 | P | — | — | — | Y | M | — | G | — | — | I | — | D | T | 0.053 | 2.742 | 0.075 | 1539 |
| Phage-1342 | — | — | — | — | Y | M | — | G | — | — | — | — | R | M | 0.055 | 2.664 | 0.057 | 1540 |
| Phage-1343 | — | — | — | — | Y | M | — | N | — | — | — | — | V | P | 0.055 | 2.663 | 0.067 | 1541 |
| Phage-1344 | — | — | — | — | Y | M | — | G | — | — | — | — | A | A | 0.066 | 2.624 | 0.057 | 1542 |
| Phage-1345 | L | — | — | — | Y | M | — | G | — | — | I | — | A | S | 0.056 | 2.598 | 0.060 | 1543 |
| Phage-1346 | — | — | — | — | Y | M | — | D | — | — | — | — | V | R | 0.080 | 2.573 | 0.061 | 1544 |
| Phage-1347 | — | — | — | — | Y | M | — | A | — | — | — | — | M | A | 0.056 | 2.563 | 0.058 | 1545 |
| Phage-1348 | E | — | — | — | Y | M | — | R | — | — | — | — | Y | R | 0.058 | 2.441 | 0.058 | 1546 |
| Phage-1349 | — | — | — | — | Y | M | — | G | — | — | — | — | V | — | 0.071 | 2.041 | 0.058 | 1547 |
| Phage-1350 | A | — | — | — | Y | M | — | D | — | — | — | — | S | K | 0.054 | 1.289 | 0.068 | 1548 |
| Phage-1351 | E | — | — | — | Y | R | — | N | — | — | — | — | K | L | 0.054 | 2.581 | 0.056 | 1549 |
| Phage-1352 | F | — | — | — | Y | R | — | N | — | — | I | — | T | K | 0.274 | 2.176 | 0.336 | 1550 |
| Phage-1353 | — | — | — | — | Y | R | — | N | — | — | L | — | R | V | 0.095 | 1.623 | 0.127 | 1551 |
| Phage-1354 | I | — | — | — | Y | R | — | G | — | — | — | — | G | T | 0.060 | 1.592 | 0.066 | 1552 |
| Phage-1355 | I | — | — | — | Y | R | — | G | — | — | — | — | Q | T | 0.058 | 1.535 | 0.059 | 1553 |
| Phage-1356 | I | — | — | — | Y | R | — | G | — | — | — | — | Y | T | 0.082 | 1.336 | 0.074 | 1554 |
| Phage-1357 | — | — | — | — | Y | V | — | D | — | — | — | — | S | S | 0.055 | 2.162 | 0.058 | 1555 |
| Phage-1358 | I | — | — | — | Q | L | — | H | — | — | — | — | R | A | 0.110 | 2.717 | 0.699 | 1556 |
| Phage-1359 | — | — | — | — | A | L | — | N | — | — | — | — | A | I | 0.070 | 2.762 | 0.426 | 1557 |
| Phage-1360 | F | — | — | — | F | M | — | H | — | — | — | — | K | D | 0.225 | 2.870 | 0.398 | 1558 |
| Phage-1361 | I | — | — | — | E | — | — | R | — | — | — | — | Y | D | 0.068 | 2.837 | 0.134 | 1559 |
| Phage-1362 | — | — | — | — | T | M | — | E | — | — | I | — | E | K | 0.116 | 2.415 | 0.144 | 1560 |
| Phage-1363 | — | — | W | — | Y | M | — | A | — | — | — | — | S | — | 0.079 | 2.820 | 0.161 | 1561 |
| Phage-1364 | I | — | — | — | F | — | — | R | — | — | — | — | S | Y | 0.432 | 2.722 | 0.527 | 1562 |
| Phage-1365 | I | — | — | — | T | L | — | N | — | — | I | — | D | G | 0.093 | 2.747 | 0.121 | 1563 |
| Phage-1366 | L | — | — | — | A | — | — | D | — | — | — | — | E | — | 0.095 | 2.706 | 0.088 | 1564 |
| Phage-1367 | L | — | — | — | A | L | — | D | — | — | — | — | K | E | 0.178 | 1.820 | 0.118 | 1565 |
| Phage-1368 | L | — | — | — | E | V | — | R | — | — | I | — | G | V | 0.064 | 2.833 | 0.357 | 1566 |
| Phage-1369 | L | — | — | — | — | — | — | R | — | — | — | — | T | P | 0.146 | 2.734 | 0.184 | 1567 |
| Phage-1370 | L | — | — | — | — | L | — | K | — | — | I | — | T | T | 0.121 | 2.772 | 0.193 | 1568 |
| Phage-1371 | L | — | — | — | R | V | — | K | — | — | — | — | D | M | 0.071 | 2.638 | 0.088 | 1569 |
| Phage-1372 | L | — | — | — | S | L | — | D | — | — | I | — | R | S | 0.069 | 2.725 | 0.070 | 1570 |
| Phage-1373 | L | — | — | — | S | M | — | N | — | — | — | — | S | V | 0.098 | 2.683 | 0.083 | 1571 |
| Phage-1374 | P | — | — | — | A | M | — | — | — | — | — | — | V | K | 0.071 | 2.718 | 0.079 | 1572 |
| Phage-1375 | P | — | — | — | — | L | — | K | — | — | — | — | I | — | 0.072 | 2.825 | 0.199 | 1573 |
| Phage-1376 | T | — | — | — | L | L | — | N | — | — | — | — | Q | H | 0.098 | 2.706 | 0.142 | 1574 |
| Phage-1377 | — | — | — | — | A | F | — | D | — | — | — | — | D | M | 0.080 | 2.740 | 0.087 | 1575 |
| Phage-1378 | — | — | — | — | Y | H | — | N | — | — | — | — | N | F | 0.077 | 2.710 | 0.099 | 1576 |
| Phage-1379 | — | — | — | — | Y | L | F | N | — | — | — | — | G | K | 0.130 | 2.757 | 0.191 | 1577 |
| Phage-1380 | A | — | — | — | A | M | — | H | — | — | M | — | D | — | 0.085 | 2.757 | 0.097 | 1578 |
| Phage-1381 | A | — | — | — | Y | L | — | H | — | — | — | — | Y | V | 0.084 | 2.322 | 0.154 | 1579 |
| Phage-1382 | D | E | — | — | I | Q | — | R | — | — | I | — | E | S | 0.060 | 2.135 | 0.094 | 1580 |
| Phage-1383 | E | — | — | — | A | L | — | R | — | — | — | — | L | S | 0.074 | 1.190 | 0.096 | 1581 |
| Phage-1384 | E | — | — | — | E | W | — | H | — | — | — | — | A | N | 0.061 | 2.728 | 0.991 | 1582 |
| Phage-1385 | E | — | — | — | F | F | — | N | — | — | — | — | A | A | 0.064 | 2.737 | 0.241 | 1583 |
| Phage-1386 | E | — | — | — | L | — | — | D | — | — | — | — | V | — | 0.088 | 2.104 | 0.078 | 1584 |
| Phage-1387 | E | — | — | — | M | L | — | R | — | — | — | — | V | S | 0.073 | 2.730 | 0.816 | 1585 |
| Phage-1388 | E | N | — | — | A | M | — | N | — | — | — | — | N | L | 0.077 | 2.714 | 0.253 | 1586 |
| Phage-1389 | F | — | — | — | A | M | — | M | — | — | — | — | L | M | 0.344 | 2.703 | 0.548 | 1587 |
| Phage-1390 | F | — | — | — | D | V | — | Y | — | — | — | — | — | A | 0.089 | 2.741 | 0.089 | 1588 |
| Phage-1391 | F | — | — | — | E | V | — | K | — | — | — | — | Y | L | 0.113 | 0.642 | 0.126 | 1589 |
| Phage-1392 | F | — | — | — | S | K | — | K | — | — | I | — | D | G | 0.079 | 1.162 | 0.208 | 1590 |
| Phage-1393 | G | N | — | — | A | T | — | A | — | — | I | — | V | N | 0.121 | 2.710 | 0.594 | 1591 |
| Phage-1394 | I | — | — | — | A | — | — | Q | — | — | — | — | W | N | 0.080 | 2.691 | 0.080 | 1592 |
| Phage-1395 | I | — | — | — | A | M | — | H | — | — | I | — | D | K | 0.075 | 2.806 | 0.156 | 1593 |
| Phage-1396 | I | — | — | — | A | M | — | Q | — | — | — | — | K | S | 0.103 | 2.733 | 0.086 | 1594 |
| Phage-1397 | I | — | — | — | A | M | — | R | — | — | I | — | N | I | 0.076 | 2.735 | 0.919 | 1595 |
| Phage-1398 | I | — | — | — | A | V | — | K | — | — | M | — | Q | I | 0.065 | 1.530 | 0.105 | 1596 |
| Phage-1399 | I | — | — | — | A | V | — | — | — | — | — | — | Y | L | 0.075 | 2.704 | 0.120 | 1597 |
| Phage-1400 | I | — | — | — | D | — | — | R | — | — | — | — | S | — | 0.066 | 2.751 | 0.068 | 1598 |
| Phage-1401 | I | — | — | — | D | M | — | Q | — | — | I | — | D | T | 0.153 | 2.728 | 0.292 | 1599 |
| Phage-1402 | I | — | — | — | E | — | F | — | — | — | — | — | R | P | 0.084 | 2.823 | 0.267 | 1600 |
| Phage-1403 | I | — | — | — | F | L | — | Q | — | — | I | — | D | T | 0.073 | 2.718 | 0.073 | 1601 |
| Phage-1404 | I | — | — | — | I | — | — | R | — | — | — | — | L | V | 0.118 | 0.627 | 0.127 | 1602 |
| Phage-1405 | I | — | — | — | — | — | — | V | — | — | I | — | N | S | 0.093 | 2.837 | 0.317 | 1603 |
| Phage-1406 | I | — | — | — | — | V | — | K | — | — | — | — | M | N | 0.086 | 2.478 | 0.126 | 1604 |
| Phage-1407 | I | — | — | — | M | L | — | H | — | — | I | — | D | G | 0.121 | 2.738 | 0.144 | 1605 |
| Phage-1408 | I | — | — | — | M | M | F | D | — | — | I | — | T | K | 0.116 | 2.695 | 0.117 | 1606 |
| Phage-1409 | I | — | — | — | P | M | — | Q | — | T | I | — | I | T | 0.080 | 2.705 | 0.081 | 1607 |
| Phage-1410 | I | — | — | — | Q | M | — | R | — | — | — | — | Y | G | 0.132 | 2.671 | 0.167 | 1608 |
| Phage-1411 | I | — | — | — | R | M | — | K | — | — | — | — | Y | G | 0.284 | 2.830 | 0.431 | 1609 |
| Phage-1412 | I | — | — | — | R | V | — | D | — | — | — | — | S | L | 0.072 | 2.704 | 0.128 | 1610 |
| Phage-1413 | I | — | — | — | S | — | — | W | — | — | — | — | Q | E | 0.160 | 2.731 | 0.177 | 1611 |
| Phage-1414 | I | — | — | — | S | L | — | E | — | — | — | — | W | S | 1.574 | 2.721 | 1.471 | 1612 |
| Phage-1415 | I | — | — | — | S | L | — | T | — | — | — | — | Q | T | 0.094 | 2.739 | 0.074 | 1613 |
| Phage-1416 | I | — | — | — | S | V | — | Y | — | — | — | — | N | S | 0.087 | 0.808 | 0.141 | 1614 |
| Phage-1417 | I | — | — | — | V | L | — | E | — | — | — | — | G | T | 0.061 | 2.687 | 0.122 | 1615 |
| Phage-1418 | I | — | — | — | W | M | — | Q | — | — | — | — | D | Y | 0.106 | 2.690 | 0.212 | 1616 |
| Phage-1419 | I | — | — | — | W | Q | — | G | — | — | — | — | Y | G | 0.126 | 2.666 | 0.118 | 1617 |
| Phage-1420 | I | — | — | — | Y | L | — | Q | — | — | I | — | T | K | 0.064 | 2.748 | 0.067 | 1618 |
| Phage-1421 | I | N | — | — | R | — | — | D | — | — | — | — | — | D | 0.098 | 0.552 | 0.122 | 1619 |
| Phage-1422 | K | — | — | — | Y | W | — | Q | — | — | I | — | G | D | 0.071 | 2.855 | 0.219 | 1620 |
| Phage-1423 | L | — | — | — | A | L | N | R | — | — | — | — | Q | A | 0.127 | 2.426 | 0.169 | 1621 |
| Phage-1424 | L | — | — | — | A | L | — | R | — | — | — | — | Q | A | 0.082 | 2.484 | 0.175 | 1622 |
| Phage-1425 | L | — | — | — | A | L | — | R | — | — | — | — | S | V | 0.109 | 1.974 | 0.135 | 1623 |
| Phage-1426 | L | — | — | — | A | M | — | K | — | — | — | — | R | S | 0.113 | 2.763 | 0.159 | 1624 |
| Phage-1427 | L | — | — | — | E | L | — | R | — | — | — | — | W | M | 0.250 | 1.784 | 0.314 | 1625 |
| Phage-1428 | L | — | — | — | E | M | — | Q | — | — | — | — | R | H | 0.069 | 2.685 | 0.089 | 1626 |
| Phage-1429 | L | — | — | — | E | R | — | A | — | — | I | — | Y | G | 0.080 | 0.553 | 0.091 | 1627 |
| Phage-1430 | L | — | — | — | — | — | N | D | — | — | I | — | G | H | 0.068 | 2.712 | 0.068 | 1628 |
| Phage-1431 | L | — | — | — | — | — | N | G | — | — | — | — | Y | T | 0.087 | 2.817 | 0.134 | 1629 |
| Phage-1432 | L | — | — | — | — | — | — | D | — | — | I | — | D | H | 0.088 | 2.692 | 0.090 | 1630 |
| Phage-1433 | L | — | — | — | — | L | — | R | — | — | — | — | I | — | 0.205 | 2.503 | 0.287 | 1631 |
| Phage-1434 | L | — | — | — | — | V | — | — | — | — | I | — | R | V | 0.218 | 1.602 | 0.240 | 1632 |
| Phage-1435 | L | — | — | — | L | M | — | N | — | — | — | — | S | H | 0.143 | 2.484 | 0.151 | 1633 |
| Phage-1436 | L | — | — | — | M | F | — | N | — | — | — | — | Q | H | 0.255 | 2.711 | 0.275 | 1634 |
| Phage-1437 | L | — | — | — | Q | — | — | K | — | — | — | — | T | — | 0.060 | 0.874 | 0.081 | 1635 |
| Phage-1438 | L | — | — | — | R | F | — | D | — | — | — | — | Q | I | 0.075 | 2.682 | 0.130 | 1636 |
| Phage-1439 | L | — | — | — | R | — | — | R | — | — | — | — | V | S | 0.263 | 2.708 | 0.329 | 1637 |
| Phage-1440 | L | — | — | — | S | — | — | H | — | — | — | — | G | D | 0.078 | 1.102 | 0.090 | 1638 |
| Phage-1441 | L | — | — | — | S | M | — | D | — | — | — | — | N | V | 0.109 | 1.130 | 0.082 | 1639 |
| Phage-1442 | L | — | — | — | S | M | — | R | — | — | — | — | V | G | 0.108 | 0.851 | 0.114 | 1640 |
| Phage-1443 | L | — | — | — | Y | L | — | G | — | — | — | — | Y | R | 0.240 | 2.705 | 0.508 | 1641 |
| Phage-1444 | L | N | — | — | D | T | — | H | — | — | I | — | G | G | 0.072 | 0.620 | 0.076 | 1642 |
| Phage-1445 | L | N | — | — | E | R | — | H | — | — | I | — | G | D | 0.106 | 2.806 | 0.138 | 1643 |
| Phage-1446 | M | — | — | — | F | — | — | G | — | — | I | — | R | Y | 0.205 | 2.723 | 0.359 | 1644 |
| Phage-1447 | M | — | — | — | F | L | — | N | — | — | — | — | D | A | 0.066 | 1.048 | 0.114 | 1645 |
| Phage-1448 | M | — | — | — | G | Y | — | H | — | — | — | — | D | E | 0.081 | 2.709 | 0.265 | 1646 |
| Phage-1449 | M | — | — | — | — | M | — | M | — | — | I | — | A | T | 0.123 | 2.753 | 0.515 | 1647 |
| Phage-1450 | M | — | — | — | L | L | — | D | — | — | — | — | R | M | 0.104 | 2.680 | 0.206 | 1648 |
| Phage-1451 | M | — | — | — | Q | V | — | A | — | — | I | — | N | M | 0.083 | 2.748 | 0.121 | 1649 |
| Phage-1452 | M | — | — | — | R | — | — | N | — | — | — | — | N | E | 0.070 | 2.704 | 0.084 | 1650 |
| Phage-1453 | M | — | — | — | S | F | — | H | — | — | I | — | K | S | 0.172 | 2.728 | 0.283 | 1651 |
| Phage-1454 | P | — | — | — | A | M | — | R | — | — | — | — | V | G | 0.086 | 2.000 | 0.074 | 1652 |
| Phage-1455 | P | — | — | — | H | L | — | R | — | — | — | — | E | W | 0.087 | 2.597 | 0.145 | 1653 |
| Phage-1456 | P | — | — | — | L | L | — | G | — | — | — | — | M | T | 0.073 | 0.621 | 0.080 | 1654 |
| Phage-1457 | P | — | — | — | R | L | — | H | — | — | — | — | L | A | 0.094 | 2.748 | 0.099 | 1655 |
| Phage-1458 | P | — | — | — | Y | — | — | A | — | — | I | — | D | S | 0.081 | 2.741 | 0.099 | 1656 |
| Phage-1459 | P | — | — | — | Y | M | — | M | — | — | I | — | A | — | 0.065 | 2.850 | 0.091 | 1657 |
| Phage-1460 | T | — | — | — | G | — | — | R | — | — | — | — | F | H | 0.096 | 2.628 | 0.086 | 1658 |
| Phage-1461 | — | — | — | — | A | — | F | A | — | — | — | — | M | M | 0.186 | 2.446 | 0.321 | 1659 |
| Phage-1462 | — | — | — | — | A | — | — | H | — | — | — | — | M | G | 0.112 | 2.841 | 0.363 | 1660 |
| Phage-1463 | — | — | — | — | A | — | — | — | — | — | — | — | R | T | 0.075 | 2.721 | 0.078 | 1661 |
| Phage-1464 | — | — | — | — | A | L | — | Q | — | — | — | — | W | — | 0.077 | 2.725 | 0.115 | 1662 |
| Phage-1465 | — | — | — | — | A | M | — | R | — | — | — | — | T | S | 0.144 | 2.702 | 0.232 | 1663 |
| Phage-1466 | — | — | — | — | A | V | — | A | — | — | — | — | A | T | 0.063 | 2.772 | 0.148 | 1664 |
| Phage-1467 | — | — | — | — | A | V | — | E | — | — | — | — | D | T | 0.084 | 2.707 | 0.108 | 1665 |
| Phage-1468 | — | — | — | — | A | V | — | N | — | — | — | — | G | L | 0.098 | 2.675 | 0.108 | 1666 |
| Phage-1469 | — | — | — | — | A | V | — | R | — | — | — | — | — | A | 0.070 | 2.766 | 0.096 | 1667 |
| Phage-1470 | — | — | — | — | E | F | — | H | — | — | I | — | Y | — | 0.153 | 2.663 | 0.160 | 1668 |
| Phage-1471 | — | — | — | — | E | L | — | R | — | — | — | — | Q | V | 0.129 | 2.679 | 0.121 | 1669 |
| Phage-1472 | — | — | — | — | E | L | — | — | — | — | — | — | Y | — | 0.060 | 2.728 | 0.093 | 1670 |
| Phage-1473 | — | — | — | — | E | L | — | W | — | — | — | — | D | R | 0.105 | 1.800 | 0.191 | 1671 |
| Phage-1474 | — | — | — | — | E | M | F | H | — | — | — | — | L | R | 0.067 | 0.996 | 0.157 | 1672 |
| Phage-1475 | — | — | — | — | E | M | — | H | — | — | I | — | Y | — | 0.096 | 2.833 | 0.114 | 1673 |
| Phage-1476 | — | — | — | — | E | M | — | R | — | — | — | — | T | G | 0.086 | 2.624 | 0.081 | 1674 |
| Phage-1477 | — | — | — | — | E | V | F | H | — | — | — | — | D | — | 0.122 | 2.782 | 0.095 | 1675 |
| Phage-1478 | — | — | — | — | E | V | — | H | — | — | — | — | L | G | 0.086 | 2.724 | 0.098 | 1676 |
| Phage-1479 | — | — | — | — | E | V | — | R | — | — | — | — | L | G | 0.074 | 2.705 | 0.080 | 1677 |
| Phage-1480 | — | — | — | — | F | L | — | P | — | — | I | — | Y | — | 0.084 | 2.754 | 0.116 | 1678 |
| Phage-1481 | — | — | — | — | G | F | — | H | — | — | I | — | Y | S | 0.097 | 2.706 | 0.377 | 1679 |
| Phage-1482 | — | — | — | — | G | — | — | Q | — | — | — | — | I | — | 0.071 | 2.689 | 0.124 | 1680 |
| Phage-1483 | — | — | — | — | G | — | — | R | — | — | I | — | E | N | 0.071 | 2.749 | 0.156 | 1681 |
| Phage-1484 | — | — | — | — | G | L | F | R | — | — | I | — | T | D | 0.104 | 2.722 | 0.180 | 1682 |
| Phage-1485 | — | — | — | — | G | L | — | H | — | — | — | — | W | T | 0.102 | 2.703 | 0.179 | 1683 |
| Phage-1486 | — | — | — | — | — | — | F | Q | — | — | — | — | V | D | 0.083 | 0.508 | 0.105 | 1684 |
| Phage-1487 | — | — | — | — | — | — | — | A | — | — | I | — | E | S | 0.076 | 2.824 | 0.123 | 1685 |
| Phage-1488 | — | — | — | — | — | — | — | — | — | — | — | — | S | Y | 0.072 | 2.684 | 0.102 | 1686 |
| Phage-1489 | — | — | — | — | — | L | F | Q | — | — | — | — | A | G | 0.131 | 2.703 | 0.192 | 1687 |
| Phage-1490 | — | — | — | — | — | L | — | K | — | — | — | — | A | V | 0.074 | 2.707 | 0.156 | 1688 |
| Phage-1491 | — | — | — | — | — | L | — | K | — | — | — | — | T | A | 0.067 | 2.685 | 0.154 | 1689 |
| Phage-1492 | — | — | — | — | — | L | — | N | — | — | — | — | P | G | 0.082 | 2.828 | 0.218 | 1690 |
| Phage-1493 | — | — | — | — | — | L | — | R | — | — | — | — | G | L | 0.086 | 2.728 | 0.093 | 1691 |
| Phage-1494 | — | — | — | — | — | V | — | R | — | — | — | — | L | A | 0.114 | 0.865 | 0.096 | 1692 |
| Phage-1495 | — | — | — | — | L | — | — | H | — | — | — | — | Y | V | 0.087 | 2.707 | 0.180 | 1693 |
| Phage-1496 | — | — | — | — | L | — | — | N | — | — | — | — | L | — | 0.094 | 1.112 | 0.115 | 1694 |
| Phage-1497 | — | — | — | — | L | L | — | D | — | — | — | — | N | G | 0.065 | 2.819 | 0.208 | 1695 |
| Phage-1498 | — | — | — | — | L | L | — | D | — | — | — | — | S | K | 0.076 | 2.844 | 0.194 | 1696 |
| Phage-1499 | — | — | — | — | L | L | — | R | — | — | — | — | V | — | 0.071 | 1.580 | 0.102 | 1697 |
| Phage-1500 | — | — | — | — | L | M | — | H | — | — | — | — | S | — | 0.075 | 2.740 | 0.131 | 1698 |
| Phage-1501 | — | — | — | — | L | V | — | R | — | — | I | — | T | — | 0.093 | 2.840 | 0.148 | 1699 |
| Phage-1502 | — | — | — | — | M | L | — | A | — | — | — | — | — | — | 0.062 | 2.682 | 0.114 | 1700 |
| Phage-1503 | — | — | — | — | M | L | — | H | — | — | I | — | Y | — | 0.120 | 2.745 | 0.104 | 1701 |
| Phage-1504 | — | — | — | — | M | V | — | R | — | — | — | — | D | N | 0.075 | 2.700 | 0.074 | 1702 |
| Phage-1505 | — | — | — | — | Q | L | — | D | — | — | — | — | N | S | 0.070 | 2.672 | 0.075 | 1703 |
| Phage-1506 | — | — | — | — | Q | L | — | N | — | — | — | — | L | K | 0.079 | 0.938 | 0.090 | 1704 |
| Phage-1507 | — | — | — | — | Q | M | — | R | — | — | — | — | Y | G | 0.129 | 2.725 | 0.117 | 1705 |
| Phage-1508 | — | — | — | — | Q | M | — | — | — | — | — | — | A | T | 0.061 | 2.711 | 0.148 | 1706 |
| Phage-1509 | — | — | — | — | R | — | — | H | — | — | — | — | K | H | 0.188 | 2.298 | 0.291 | 1707 |
| Phage-1510 | — | — | — | — | R | L | — | D | — | — | — | — | M | T | 0.080 | 2.827 | 0.147 | 1708 |
| Phage-1511 | — | — | — | — | R | L | — | D | — | — | — | — | S | G | 0.078 | 2.730 | 0.103 | 1709 |
| Phage-1512 | — | — | — | — | R | L | — | M | — | — | I | — | L | E | 0.083 | 2.734 | 0.123 | 1710 |
| Phage-1513 | — | — | — | — | R | L | — | N | — | — | — | — | I | T | 0.094 | 2.703 | 0.128 | 1711 |
| Phage-1514 | — | — | — | — | R | L | — | R | — | — | I | — | Q | H | 0.165 | 2.714 | 0.284 | 1712 |
| Phage-1515 | — | — | — | — | R | L | — | — | — | — | — | — | D | P | 0.064 | 1.575 | 0.084 | 1713 |
| Phage-1516 | — | — | — | — | R | M | — | A | — | — | I | — | D | P | 0.105 | 2.738 | 0.161 | 1714 |
| Phage-1517 | — | — | — | — | R | M | — | A | — | — | — | — | S | H | 0.084 | 2.713 | 0.119 | 1715 |
| Phage-1518 | — | — | — | — | R | M | — | D | — | — | — | — | T | S | 0.073 | 1.039 | 0.080 | 1716 |
| Phage-1519 | — | — | — | — | R | M | — | — | — | — | — | — | T | T | 0.111 | 1.917 | 0.133 | 1717 |
| Phage-1520 | — | — | — | — | S | — | — | R | — | — | — | — | N | G | 0.076 | 2.686 | 0.069 | 1718 |
| Phage-1521 | — | — | — | — | S | L | — | H | — | — | — | — | M | R | 0.090 | 2.592 | 0.146 | 1719 |
| Phage-1522 | — | — | — | — | S | L | — | — | — | — | — | — | E | A | 0.066 | 2.711 | 0.210 | 1720 |
| Phage-1523 | — | — | — | — | S | M | — | A | — | — | — | — | N | Y | 0.080 | 2.708 | 0.163 | 1721 |
| Phage-1524 | — | — | — | — | S | M | — | D | — | — | — | — | T | A | 0.067 | 2.649 | 0.079 | 1722 |
| Phage-1525 | — | — | — | — | S | M | — | R | — | — | — | — | Y | E | 0.080 | 2.733 | 0.079 | 1723 |
| Phage-1526 | — | — | — | — | S | V | — | G | — | — | — | — | N | L | 0.080 | 0.754 | 0.094 | 1724 |
| Phage-1527 | — | — | — | — | S | V | — | Y | — | — | I | — | Q | N | 0.068 | 2.730 | 0.116 | 1725 |
| Phage-1528 | — | — | — | — | T | — | F | H | — | — | — | — | Q | S | 0.150 | 2.730 | 0.195 | 1726 |
| Phage-1529 | — | — | — | — | T | — | — | Q | — | — | I | — | R | S | 0.098 | 2.830 | 0.175 | 1727 |
| Phage-1530 | — | — | — | — | T | L | — | Q | — | — | — | — | L | K | 0.083 | 2.619 | 0.093 | 1728 |
| Phage-1531 | — | — | — | — | W | L | — | Q | — | — | I | — | N | G | 0.154 | 2.823 | 0.196 | 1729 |
| Phage-1532 | — | — | — | — | W | L | — | Q | — | — | — | — | N | S | 0.151 | 2.725 | 0.139 | 1730 |
| Phage-1533 | — | — | — | — | W | L | — | R | — | — | — | — | T | — | 0.624 | 2.695 | 0.795 | 1731 |
| Phage-1534 | — | — | — | — | W | M | — | D | — | — | — | — | R | V | 0.166 | 2.067 | 0.210 | 1732 |
| Phage-1535 | — | — | — | — | Y | L | — | G | — | — | — | — | M | L | 0.139 | 2.476 | 0.131 | 1733 |
| Phage-1536 | — | — | — | — | Y | L | — | Q | — | — | — | — | G | K | 0.061 | 2.559 | 0.243 | 1734 |
| Phage-1537 | — | — | — | — | Y | L | — | V | — | — | — | — | L | R | 0.107 | 2.667 | 0.157 | 1735 |
| Phage-1538 | — | — | — | — | Y | M | — | G | — | — | — | — | N | P | 0.078 | 2.780 | 0.162 | 1736 |
| Phage-1539 | — | — | — | — | Y | M | — | G | — | — | — | — | R | L | 0.075 | 2.735 | 0.070 | 1737 |
| Phage-1540 | — | — | W | — | A | L | — | D | — | — | — | — | E | — | 0.094 | 2.714 | 0.116 | 1738 |
| Phage-1541 | — | — | W | — | H | — | — | R | — | — | — | — | D | M | 0.131 | 2.001 | 0.222 | 1739 |
| Phage-1542 | — | — | W | — | T | L | — | A | — | — | — | — | Q | — | 0.146 | 2.466 | 0.195 | 1740 |
| Phage-1543 | — | N | — | — | Q | — | — | E | — | — | I | — | T | S | 0.187 | 1.474 | 0.138 | 1741 |
| Phage-1544 | W | K | — | — | A | T | S | M | — | — | N | — | V | D | 0.133 | 2.852 | 0.223 | 1742 |
| Phage-1545 | I | — | — | — | I | L | — | D | — | — | — | — | E | G | 0.146 | 2.661 | 0.121 | 1743 |
| Phage-1546 | A | — | L | — | Y | L | Q | P | Q | — | — | — | E | T | 0.065 | 0.058 | 0.084 | 1744 |
| Phage-1547 | E | — | — | — | M | R | — | N | — | — | — | — | R | E | 0.074 | 0.098 | 0.088 | 1745 |
| Phage-1548 | E | — | — | — | Q | T | — | R | — | — | I | — | I | Y | 0.072 | 0.094 | 0.100 | 1746 |
| Phage-1549 | G | T | — | — | P | T | S | Q | — | R | Y | — | I | I | 0.108 | 0.106 | 0.421 | 1747 |
| Phage-1550 | I | — | — | — | E | R | — | — | — | — | — | — | V | T | 0.077 | 0.184 | 0.093 | 1748 |
| Phage-1551 | L | — | — | — | W | L | — | R | — | — | — | — | E | N | 0.464 | 1.967 | 0.712 | 1749 |
| Phage-1552 | L | E | — | — | A | W | Q | L | — | S | — | — | D | D | 0.081 | 0.075 | 0.136 | 1750 |
| Phage-1553 | L | N | — | — | A | F | — | D | — | — | I | — | — | T | 0.872 | 2.693 | 1.387 | 1751 |
| Phage-1554 | P | — | — | — | E | M | — | N | — | — | — | — | D | R | 0.071 | 0.493 | 0.072 | 1752 |
| Phage-1555 | P | — | — | — | L | L | — | K | — | — | I | — | P | S | 0.074 | 0.381 | 0.082 | 1753 |
| Phage-1556 | — | — | — | — | A | L | — | H | — | — | I | — | D | T | 1.367 | 2.725 | 1.630 | 1754 |
| Phage-1557 | — | — | — | — | G | L | — | K | — | — | — | — | S | M | 0.102 | 0.480 | 0.108 | 1755 |
| Phage-1558 | — | — | — | — | G | M | — | K | — | — | I | — | N | K | 0.075 | 0.249 | 0.082 | 1756 |
| Phage-1559 | — | — | — | — | S | V | — | D | — | — | — | — | W | G | 0.074 | 0.332 | 0.077 | 1757 |
| Phage-1560 | — | — | — | — | W | — | — | G | — | — | — | — | Q | S | 0.124 | 0.298 | 0.191 | 1758 |
| Phage-1561 | — | — | — | — | W | L | — | R | — | — | — | — | F | D | 1.299 | 2.660 | 1.660 | 1759 |
| Phage-1562 | — | — | W | — | G | L | — | N | — | — | — | — | T | W | 0.468 | 2.082 | 0.674 | 1760 |
| Phage-1563 | — | E | Q | — | G | L | Q | — | L | R | G | — | K | V | 0.070 | 0.071 | 0.097 | 1761 |
| Phage-1564 | W | — | — | — | F | L | — | — | — | — | — | — | D | S | 0.329 | 0.858 | 0.465 | 1762 |
| Phage-1565 | I | — | — | — | Q | — | — | G | — | — | — | — | L | G | 0.080 | 2.478 | 0.078 | 1763 |
| Phage-1566 | I | — | — | — | L | L | — | K | — | — | — | — | D | L | 0.070 | 2.731 | 0.332 | 1764 |
| Phage-1567 | — | — | — | — | E | L | — | H | — | — | I | — | Y | — | 0.114 | 2.730 | 0.332 | 1765 |
| Phage-1568 | — | — | — | — | T | L | — | D | — | — | — | — | R | K | 0.080 | 2.642 | 0.088 | 1766 |
| Phage-1569 | L | — | — | — | E | V | N | R | — | — | I | — | G | V | 0.080 | 2.698 | 0.075 | 1767 |
| Phage-1570 | I | — | — | — | M | M | F | D | — | — | — | — | N | K | 0.122 | 2.062 | 0.152 | 1768 |
| Phage-1571 | L | — | — | — | F | F | — | D | — | — | — | — | R | N | 0.072 | 2.841 | 0.221 | 1769 |
| Phage-1572 | P | — | — | — | V | L | — | H | — | — | I | — | A | A | 0.075 | 2.715 | 0.070 | 1770 |
| Phage-1573 | — | — | — | — | A | — | — | — | — | — | I | — | K | T | 0.134 | 2.694 | 0.169 | 1771 |
| Phage-1574 | — | — | — | — | L | F | — | R | — | — | I | — | T | E | 0.125 | 2.717 | 0.154 | 1772 |
| Phage-1575 | — | — | — | — | L | — | — | G | — | — | I | — | S | S | 0.075 | 2.718 | 0.124 | 1773 |
| Phage-1576 | W | I | — | V | G | L | M | L | A | L | — | G | T | I | 0.067 | 2.717 | 0.092 | 1774 |

(—) indicates same amino acid as in TROP2 Fab Peptide-2 corresponding position (e.g. Phage-981 position).

TABLE 30
Sequences of those peptides selected for synthesis
(TROP2 Fab Peptide-2 Optimization)

| Construct | | |
|---|---|---|
| Description | Amino Acid Sequence | SEQ ID NO: |
| Peptide-50 | IDFCAMYQWPICDT | 179 |
| Peptide-51 | IDFCAVYKWPVCQV | 180 |
| Peptide-52 | IDFCMLYNWPICAG | 181 |
| Peptide-53 | VDFCKIYAWPICGS | 182 |
| Peptide-54 | VDFCKLYNWPVCQT | 183 |
| Peptide-55 | IDFCLIYNWPVCDT | 184 |
| Peptide-56 | EDFCKLYNWPICYQ | 185 |
| Peptide-57 | VDFCGLYHWPICYQ | 186 |
| Peptide-58 | VDFCYLYNWPVCSK | 187 |
| Peptide-59 | IDFCAIYQWPVCRS | 188 |
| Peptide-60 | VDFCALYNWPVCET | 189 |
| Peptide-61 | PDFCAVYRWPICYQ | 190 |
| Peptide-62 | VDFCELYRWPICNS | 191 |
| Peptide-63 | LDFCKIYDWPICHL | 192 |
| Peptide-64 | LDFCKLYQWPVCFT | 193 |
| Peptide-65 | IDFCLLYDWPVCAS | 194 |
| Peptide-66 | IDFCLLYDWPICGR | 195 |
| Peptide-67 | MDFCQIYDWPICRL | 196 |
| Peptide-68 | PDFCQLYNWPVCAG | 197 |
| Peptide-69 | VDFCSFYRWPICET | 198 |
| Peptide-70 | IDFCSLYQWPVCGT | 199 |
| Peptide-71 | VDFCTIYKWPVCEG | 200 |
| Peptide-72 | VDFCYQYGWPICSR | 201 |

### Example 10: TROP2 Polypeptide Complex Binding (PC25. PC26, PC27, PC28, PC29, and PC30)

[0670] PC25, PC26, PC27, PC28, PC29, and PC30, the sequences of which are provided in Table 6 were evaluated for TROP2 and CD3ε binding according to the methods of Example 1. FIGS. 22 and 23 show representative ELISAs of TROP2 and CD3ε binding, respectively.

### Example 11: Polypeptide Complex Mediated Tumor Cytotoxicity

[0671] Polypeptide complexes were evaluated in a functional in vitro tumor cell killing assay using the TROP2 positive tumor cell lines HCT116, NCI-1H292, and MDAMB231. Tumor cell killing was measured using an xCelligence real time cell analyzer from Agilent that relies on sensor impedance measurements (cell index) that increased as tumor cells adhere, spread, and expand on the surface of the sensor. Likewise, as the tumor cells were killed the impedance decreased. 10,000 tumor cells were added per well and allowed to adhere overnight on a 96 well E-Plate. The following day polypeptide complexes titrated in human serum supplemented medium along with 30,000 CD8+ T cells were added to the wells. Cell index measurements were taken every 10 minutes for an additional 72 hours. The cell index times number of hours (tumor cell growth kinetics) was then plotted versus concentration of polypeptide complex where the concentration required to reduce the tumor growth 50% (IC50) was calculated using Graphpad Prism software. FIG. 24A illustrates PC25 mediated HCT116 tumor cell killing in the presence of CD8+ T cells. FIG. 24B illustrates PC26 mediated HCT116 tumor cell killing in the presence of CD8+ T cells. FIG. 24C illustrates PC25 mediated MDAMB231 tumor cell killing in the presence of CD8+ T cells.

### Example 12: Polypeptide Complex-22 (PC22) Pharmacokinetics in Cynomolgus Monkey

[0672] Pharmacokinetics and exploratory safety of polypeptide molecules were evaluated in cynomolgus monkeys. Briefly, cynomolgus monkeys of approximately 3 kg bodyweight were administered polypeptides as an IV bolus and observed daily for signs of adverse events. No in-life adverse events were observed. After dosing, blood was collected in K2 EDTA tubes at specific timepoints and processed to plasma. Plasma was stored frozen until analysis. Concentration of polypeptide molecules in plasma was measured via standard ELISA techniques relative to a reference standard diluted in control cyno plasma. Plasma concentration curves were fit to a standard two phase exponential equation representing distribution and elimination phases. Fitting of pharmacokinetics enabled the calculation of Cmax, half-life, volume of distribution, clearance, and 7 day area under the curve (AUC) shown in Table 31 and in FIG. 25. Measured pharmacokinetics in cyno support once weekly dosing in humans.

TABLE 31
PC22 PK calculations

| | PC22 100 ug/kg | Units |
|---|---|---|
| C_{MAX} | 17.38 | nM |
| t_{1/2} | 68.97 | hr |
| Vd | 0.18 | L |
| VSS | 0.44 | L |
| CL | 0.61 | mL/hr/kg |
| BW | 3.00 | kg |
| 7 day | 45640 | nM · min |
| AUC | | |

### Example 13: PC22 in Cynomolgus Cytokine Release

[0673] Cytokine release after polypeptide molecule administration by IV bolus was evaluated in cynomolgus monkeys. Briefly, cynomolgus monkeys of approximately 3 kg bodyweight were administered polypeptides as an IV bolus and observed daily for signs of adverse events. No in-life adverse events were observed. After dosing, blood was collected in K2 EDTA tubes at specific timepoints and processed to plasma. Plasma was stored frozen until analysis. Plasma samples were analyzed for cytokines using a non-human primate cytometric Th1/Th2 bead array kit from BD biosciences following the manufacturer's instructions. Interferon gamma, tumor necrosis factor alpha, interleukin 6, interleukin 5, interleukin 4, and interleukin 2 levels in plasma were calculated relative to reference standards provided with the bead array kit. FIGS. 26A-26F illustrate cytokine release in cynomolgus monkeys after single IV bolus of PC22.

### Example 14: PC22 in Cynomolgus Toxicity

[0674] Systemic liver enzymes after PC22 administration by IV bolus was evaluated in cynomolgus monkeys. Briefly, cynomolgus monkeys of approximately 3 kg bodyweight were administered polypeptides as an IV bolus and observed daily for signs of adverse events. No in-life adverse events were observed. After dosing, blood was collected in K2 EDTA tubes at specific timepoints and processed to plasma. Plasma was stored frozen until analysis. Plasma samples were analyzed for the presence of liver enzymes aspartate transaminase (AST) and alanine aminotransferase (ALT) as signs of potential liver toxicity. AST and ALT levels were remained within the normal ranges for all timepoints tested after dosing suggesting a lack of liver toxicity. AST and ALT were quantified following the instructions provided in a commercially available kit from Millipore. AST and ALT levels were calculated according to manufacturer's instructions relative to a positive control reference standard. FIGS. 27A-27B illustrate serum liver enzyme levels in cynomolgus monkeys after single IV bolus of PC22.

### Example 15: Anti-Tumor Efficacy in a Mouse Model of Human Triple Negative Breast Cancer

[0675] Female NCG mice were subcutaneously implanted with 5 million MDA-MB-231 triple negative tumor cells. When tumors reached 50-80 mm³, 20 million human PBMCs were engrafted via the tail vein. When tumors reached 275 mm3, mice were randomized into groups and compounds were dosed intravenously every day for 10 days. Tumor volume was measured every two to three days and plotted overtime. The tumor volume growth kinetics indicate anti-tumor activity of masked TROP2 targeted bispecific compounds. The anti-tumor activity observed was protease dependent in that the compound lacking the protease substrate within the cleavable linker was equivalent to vehicle controls. Shown are PC3 (FIG. 28A), PC17 (FIG. 28B), PC23 (FIG. 28C), PC24 (FIG. 28D).

### Example 16: Optimized Phage Library Construction—CD3 scFv Peptides

[0676] Sequence activity relationships (SAR) were established for Peptide-A and Peptide-B by mutating each individual residue within the peptide to alanine and measuring binding and inhibition against SP34.185 scFv. Peptide residues whose alanine mutations significantly weakened binding and inhibition can be considered critical residues where mutations were not tolerated. Peptide residues whose alanine mutations performed similarly to the non-mutated sequence can be considered non-critical sites where mutations were indeed tolerated. Using the peptide SAR, DNA oligo libraries were constructed where codons encoding critical residues within each peptide sequence were minimally mutated and codons encoding non-critical residues were heavily mutated. The resulting oligos were cloned into bacteriophage vectors used to display the SAR guided peptides via fusion to the pIII filament of the bacteriophage. The relevant vectors were then used to produce the phage optimization libraries via amplification in bacteria using standard techniques in the field.

[0677] Peptides were evaluated for their ability to bind SP34.185 scFv by standard enzyme linked immunosorbent assays (ELISAs). Briefly, biotinylated peptides were captured on neutravidin coated plates, quench with biocytin followed by a washing step. SP34.185 scFv was then titrated onto the peptide captured plates. Plates were then washed and bound SP34.185 scFv was detected using a secondary horse radish peroxidase antibody conjugate. After washing again, plates were developed using standard ELISA techniques and stopped using acid. The concentration of SP34.185 scFv required to achieve 50% maximal signal or EC50 was calculated using Graphpad prism. Data is shown in FIGS. 29A-29F and summarized in Tables 32A-32D. Peptide Sequences of CD3 Ala Scan Peptides for Peptide A and Peptide-B are shown in Table 34.

TABLE 32A
Summary of FIG. 29B

| ELISA | Peptide-A | Peptide-C | Peptide-D | Peptide-E | Peptide-F | Peptide-G | Peptide-H |
|---|---|---|---|---|---|---|---|
| EC50 nM | 1.013 | 0.9429 | 1.018 | 0.9738 | 1.27 | 47.5 | 346.2 |

TABLE 32B
Summary of FIG. 29C

| ELISA | Peptide-A | Peptide-I | Peptide-J | Peptide-K | Peptide-L | Peptide-M | Peptide-N |
|---|---|---|---|---|---|---|---|
| EC50 nM | 0.986 | 310.8 | 3.134 | 1.960 | 4.363 | 2.76 | 1.546 |

TABLE 32C
Summary of FIG. 29E

| ELISA | Peptide-O | Peptide-P | Peptide-Q | Peptide-R | Peptide-S | Peptide-T |
|---|---|---|---|---|---|---|
| EC50 nM | 1.356 | 2.359 | 30.04 | 47.50 | 457.1 | 4.762 |

TABLE 32D
Summary of FIG. 29F

| ELISA | Peptide-U | Peptide-V | Peptide-W | Peptide-X | Peptide-Y | Peptide-Z |
|---|---|---|---|---|---|---|
| EC50 nM | 39.90 | 2168 | 1.916 | 1.948 | 2.012 | 1.833 |

[0678] Peptides were evaluated for their ability to inhibit SP34.185 scFv from binding CD3e by standard enzyme linked immunosorbent assays (ELISAs). Briefly, a fixed concentration of SP34.185 scFv was incubated with varying concentrations of peptides in solution. SP34.185scFv and peptide solutions were incubated for 1 hr prior to addition to CD3 coated plates. Binding was allowed to proceed for 30 min prior to washing. After washing, bound SP34.185 scFv using a secondary horse radish peroxidase antibody conjugate. After washing again, plates were developed using standard ELISA techniques and stopped using acid. The concentration of peptide required to inhibit 50% of the SP34.185 scFv CD3 binding signal (IC50) was calculated using Graphpad prism. Data is shown in FIGS. 30A-30F and summarized in Tables 33A-33D.

TABLE 33A
Summary of FIG. 30B

| ELISA | Peptide-A | Peptide-C | Peptide-D | Peptide-E | Peptide-F | Peptide-G | Peptide-H |
|---|---|---|---|---|---|---|---|
| IC50 uM | 0.1926 | 0.1025 | 0.2318 | 0.1905 | 5.484 | >100 | >100 |

TABLE 33B
Summary of FIG. 30C

| ELISA | Peptide-A | Peptide-I | Peptide-10 | Peptide-K | Peptide-L | Peptide-M | Peptide-N |
|---|---|---|---|---|---|---|---|
| IC50 uM | 0.1138 | >100 | 63.18 | >100 | 86.78 | 36.66 | 3.009 |

TABLE 33C
Summary of FIG. 30E

| ELISA | Peptide-O | Peptide-P | Peptide-Q | Peptide-R | Peptide-S | Peptide-T |
|---|---|---|---|---|---|---|
| IC50 uM | 0.1473 | 3.333 | >100 | >100 | >100 | 41.46 |

TABLE 33D
Summary of FIG. 30F

| ELISA | Peptide-U | Peptide-V | Peptide-W | Peptide-X | Peptide-Y | Peptide-Z |
|---|---|---|---|---|---|---|
| IC50 uM | >100 | >100 | 1.912 | 0.6992 | 1.456 | 0.1180 |

TABLE 34
CD3 Ala Scan Sequences-Peptide A and Peptide-B

| | | | SEQ |
|---|---|---|---|
| | anti-CD3 | | ID |
| Peptide-ID | Panned target | Sequence | NO: |
| Peptide-A | SP34.185 | GSQCLGPEWEVCPY | 202 |
| Peptide-C | SP34.185 | ASQCLGPEWEVCPY | 203 |
| Peptide-D | SP34.185 | GAQCLGPEWEVCPY | 204 |
| Peptide-E | SP34.185 | GSACLGPEWEVCPY | 205 |
| Peptide-F | SP34.185 | GSQCAGPEWEVCPY | 206 |
| Peptide-G | SP34.185 | GSQCLAPEWEVCPY | 207 |
| Peptide-H | SP34.185 | GSQCLGAEWEVCPY | 208 |
| Peptide-I | SP34.185 | GSQCLGPAWEVCPY | 209 |
| Peptide-J | SP34.185 | GSQCLGPEAEVCPY | 210 |
| Peptide-K | SP34.185 | GSQCLGPEWAVCPY | 211 |
| Peptide-L | SP34.185 | GSQCLGPEWEACPY | 212 |
| Peptide-M | SP34.185 | GSQCLGPEWEVCAY | 213 |
| Peptide-N | SP34.185 | GSQCLGPEWEVCPA | 214 |
| Peptide-A | SP34.185 | GSQCLGPEWEVCPY | 215 |
| Peptide-B | SP34.185 | VYCGPEFDESVGCM | 216 |
| Peptide-O | SP34.185 | AYCGPEFDESVGCM | 217 |
| Peptide-P | SP34.185 | VACGPEFDESVGCM | 218 |
| Peptide-Q | SP34.185 | VYCAPEFDESVGCM | 219 |
| Peptide-R | SP34.185 | VYCGAEFDESVGCM | 220 |
| Peptide-S | SP34.185 | VYCGPAFDESVGCM | 221 |
| Peptide-T | SP34.185 | VYCGPEADESVGCM | 222 |
| Peptide-U | SP34.185 | VYCGPEFAESVGCM | 223 |
| Peptide-V | SP34.185 | VYCGPEFDASVGCM | 224 |
| Peptide-W | SP34.185 | VYCGPEFDEAVGCM | 225 |
| Peptide-X | SP34.185 | VYCGPEFDESAGCM | 226 |
| Peptide-Y | SP34.185 | VYCGPEFDESVACM | 227 |
| Peptide-Z | SP34.185 | VYCGPEFDESVGCA | 228 |

### Example 17: Panning of the Optimized Phage Library Construction—CD3 scFv Peptides

[0679] Once the phage optimization libraries were completed, phage libraries were bio-panned using SP34.185 scFv loaded beads. Multiple rounds of panning were performed where bacteriophage was allowed to bind to SP34.185 scFv loaded beads, washed, eluted, and amplified. Additional selective pressure was included during each round of panning using a fixed concentration of CD3, Peptide-A, or Peptide-B. After panning, phage infected bacteria were plated out and colonies picked into 96 well blocks. Clonal phage was then amplified and separated from bacterial cells via centrifugation. Phage containing supernatants were tested in binding ELISAs against SP34.185 scFv coated plates in the presence or absence of saturating concentration of CD3. Phage able to bind SP34.185 scFv were selected for sequence analysis if the binding signal was reduced in the presence of CD3.

### Example 18: Panning ELISAs—CD3 scFv Peptides

[0680] Clonal phages were harvested as crude supernatants and screened via standard enzyme linked immunosorbent assays (ELISAs). Briefly, biotinylated SP34.185 scFv was captured on neutravidin coated plates. Prior to the addition of clonal phage, wells were incubated with blocking buffer and CD3 or blocking buffer alone. Without washing or aspirating, clonal phage supernatants were then added to the wells and incubated for a short time. Wells were then washed followed by detection of bound phage using a horse radish peroxidase conjugated anti-M13 antibody. Clonal phage of interest was then sent for sequence analysis.

[0681] Phage panning results of CD3 scFv Peptide-A library sequences are shown in Table 35. The sequences of those peptides selected for synthesis are shown in Table 36, and further evaluated for binding to anti-CD3 scFv (FIGS. 31A-31B) and inhibition of anti-CD3 scFv binding to CD3 (FIGS. 32A-32B). The consensus sequence shown in FIG. 33 was calculated from all the sequences shown in Table 35 and was generated using WebLogo 3.7.4.

TABLE 35
Clonal Phage Peptide Sequences from the Peptide-B Optimization Library Panning

| | | | | | | | | | | | | | | | Phage binding ELISA | | | |
|---|---|---|---|---|---|---|---|---|---|---|---|---|---|---|---|---|---|---|
| | | | | | | | | | | | | | | | | | SP34.185 | |
| | | | | | | | | | | | | | | | | SP34.185 | scFv signal | SEQ |
| Phage | Amino acid position sequence | | | | | | | | | | | | | | Backgroud | ScFv | in presence | ID |
| ID | 1 | 2 | 3 | 4 | 5 | 6 | 7 | 8 | 9 | 1Q | 11 | 12 | 13 | 14 | signal | signal | of CD3 | NO: |
| Phage-1/ | V | Y | C | G | P | E | F | D | E | S | V | G | C | M | 0.06 | 2.79 | 0.09 | 27 |
| Peptide B | | | | | | | | | | | | | | | | | | |
| Phage-2 | D | D | — | W | — | D | W | E | F | D | F | A | — | A | 0.08 | 2.75 | 0.09 | 229 |
| Phage-3 | Y | I | — | — | L | D | — | P | D | F | L | Y | — | D | 0.08 | 2.88 | 0.10 | 230 |
| Phage-4 | F | D | — | W | — | D | W | E | — | Y | F | V | — | D | 0.08 | 2.79 | 0.09 | 231 |
| Phage-5 | Y | I | — | W | — | D | W | E | — | Y | F | D | — | D | 0.08 | 2.74 | 0.09 | 232 |
| Phage-6 | N | I | — | W | — | D | W | E | D | D | Y | F | — | F | 0.09 | 2.54 | 0.09 | 233 |
| Phage-7 | N | F | — | W | — | D | W | E | Y | I | Y | P | — | I | 0.07 | 2.77 | 0.09 | 234 |
| Phage-8 | — | D | — | W | — | D | W | E | — | D | F | L | — | I | 0.08 | 2.54 | 0.08 | 235 |
| Phage-9 | H | A | — | W | — | D | W | E | — | Y | F | P | — | N | 0.08 | 2.85 | 0.09 | 236 |
| Phage-10 | Y | D | — | — | — | D | V | — | — | — | Y | V | — | V | 0.09 | 2.63 | 0.10 | 237 |
| Phage-11 | I | D | — | W | — | D | W | E | D | D | T | F | — | Y | 0.09 | 2.73 | 0.08 | 238 |
| Phage-12 | Y | L | — | — | — | D | G | — | — | T | L | A | — | Y | 0.08 | 2.66 | 0.15 | 239 |
| Phage-13 | — | D | — | — | — | D | G | — | — | — | I | L | — | Y | 0.11 | 2.13 | 0.08 | 240 |
| Phage-14 | F | I | — | W | — | D | W | E | — | D | Y | F | — | A | 0.07 | 2.44 | 0.09 | 1775 |
| Phage-15 | G | D | — | W | — | D | W | E | W | D | F | Y | — | D | 0.07 | 2.71 | 0.07 | 1776 |
| Phage-16 | Y | L | — | W | — | D | W | E | Y | I | D | L | — | D | 0.12 | 2.67 | 0.08 | 1777 |
| Phage-17 | S | F | — | W | — | D | W | E | — | Y | F | D | — | D | 0.10 | 2.60 | 0.07 | 1778 |
| Phage-18 | D | D | — | W | — | D | W | E | — | Y | A | S | — | D | 0.09 | 2.57 | 0.07 | 1779 |
| Phage-19 | N | L | — | W | — | D | W | E | Y | P | F | F | — | D | 0.09 | 2.52 | 0.09 | 1780 |
| Phage-20 | F | D | — | W | — | D | W | E | — | — | F | V | — | D | 0.08 | 2.34 | 0.09 | 1781 |
| Phage-21 | D | I | — | — | — | D | G | — | — | T | I | I | — | D | 0.13 | 2.30 | 0.10 | 1782 |
| Phage-22 | D | D | — | W | — | D | W | E | Y | Y | A | V | — | D | 0.09 | 2.28 | 0.09 | 1783 |
| Phage-23 | Y | D | — | W | — | D | W | E | — | Y | S | N | — | D | 0.10 | 2.17 | 0.08 | 1784 |
| Phage-24 | I | N | — | W | — | D | W | E | D | Y | F | F | — | D | 0.07 | 2.16 | 0.07 | 1785 |
| Phage-25 | N | I | — | W | — | D | W | E | D | D | T | F | — | F | 0.06 | 2.87 | 0.07 | 1786 |
| Phage-26 | N | I | — | W | — | D | W | E | P | N | S | F | — | F | 0.09 | 2.87 | 0.08 | 1787 |
| Phage-27 | Y | D | — | — | — | — | M | — | — | — | I | D | — | F | 0.09 | 2.39 | 0.08 | 1788 |
| Phage-28 | D | F | — | W | — | D | W | E | F | P | F | I | — | H | 0.11 | 2.73 | 0.12 | 1789 |
| Phage-29 | D | F | — | — | — | — | M | — | — | — | I | T | — | I | 0.07 | 2.36 | 0.08 | 1790 |
| Phage-30 | Y | D | — | — | — | — | — | — | — | — | T | V | — | I | 0.10 | 2.32 | 0.08 | 1791 |
| Phage-31 | H | D | — | W | — | D | W | E | W | D | I | F | — | I | 0.07 | 2.26 | 0.08 | 1792 |
| Phage-32 | H | A | — | W | — | D | W | E | — | Y | N | P | — | N | 0.11 | 2.71 | 0.11 | 1793 |
| Phage-33 | D | V | — | W | — | D | W | E | W | D | F | F | — | N | 0.08 | 2.65 | 0.08 | 1794 |
| Phage-34 | N | — | — | W | — | D | W | E | Y | Y | I | P | — | N | 0.10 | 2.57 | 0.08 | 1795 |
| Phage-35 | I | I | — | W | — | D | W | E | F | I | D | Y | — | N | 0.08 | 2.10 | 0.07 | 1796 |
| Phage-36 | S | L | — | W | — | D | W | E | Y | D | I | A | — | P | 0.07 | 2.53 | 0.08 | 1797 |
| Phage-37 | D | L | — | — | — | — | L | — | — | — | I | F | — | P | 0.08 | 2.49 | 0.09 | 1798 |
| Phage-38 | T | N | — | W | — | D | W | E | W | V | L | P | — | P | 0.14 | 2.47 | 0.10 | 1799 |
| Phage-39 | I | E | — | W | — | D | W | E | P | N | Y | F | — | P | 0.13 | 2.29 | 0.09 | 1800 |
| Phage-40 | I | F | — | W | — | D | W | E | D | Y | — | D | — | P | 0.07 | 2.28 | 0.07 | 1801 |
| Phage-41 | I | D | — | W | — | D | W | E | Y | D | F | F | — | P | 0.07 | 2.26 | 0.08 | 1802 |
| Phage-42 | L | F | — | W | — | D | W | E | D | — | F | F | — | P | 0.18 | 2.11 | 0.13 | 1803 |
| Phage-43 | — | D | — | W | — | D | W | E | D | Y | A | D | — | T | 0.11 | 2.20 | 0.10 | 1804 |
| Phage-44 | — | I | — | W | — | D | W | E | Q | Y | F | P | — | V | 0.11 | 2.34 | 0.09 | 1805 |
| Phage-45 | I | E | — | W | — | D | W | E | P | I | Y | P | — | Y | 0.09 | 2.85 | 0.09 | 1806 |
| Phage-46 | I | T | — | W | — | D | W | E | V | Y | F | P | — | Y | 0.07 | 2.55 | 0.08 | 1807 |
| Phage-47 | I | D | — | W | — | D | W | E | Y | I | H | P | — | Y | 0.06 | 2.51 | 0.09 | 1808 |
| Phage-48 | I | D | — | W | — | D | W | E | Y | I | N | P | — | — | 0.12 | 2.50 | 0.12 | 1809 |
| Phage-49 | A | D | — | W | — | D | W | E | — | A | F | P | — | Y | 0.09 | 2.44 | 0.09 | 1810 |
| Phage-50 | I | D | — | W | — | D | W | E | Y | I | Y | P | — | Y | 0.09 | 2.31 | 0.07 | 1811 |
| Phage-51 | N | I | — | W | — | D | W | E | D | D | N | F | — | F | 0.09 | 2.08 | 0.09 | 1812 |
| Phage-52 | Y | D | — | W | — | D | W | E | Y | V | D | A | — | Y | 0.09 | 2.06 | 0.09 | 1813 |
| Phage-53 | F | — | — | — | — | D | G | — | — | — | Y | V | — | D | 0.09 | 2.03 | 0.11 | 1814 |
| Phage-54 | D | I | — | W | — | D | W | E | Y | I | N | I | — | S | 0.11 | 2.02 | 0.11 | 1815 |
| Phage-55 | F | V | — | W | — | D | W | E | D | F | N | F | — | D | 0.07 | 2.01 | 0.08 | 1816 |
| Phage-56 | F | A | — | W | — | D | W | E | D | Y | — | A | — | D | 0.07 | 2.01 | 0.09 | 1817 |
| Phage-57 | D | N | — | W | — | D | W | E | Y | D | F | F | — | V | 0.08 | 1.99 | 0.09 | 1818 |
| Phage-58 | Y | D | — | W | — | D | W | E | — | Y | N | D | — | A | 0.09 | 1.96 | 0.11 | 1819 |
| Phage-59 | D | D | — | — | — | D | G | — | — | T | I | I | — | V | 0.07 | 1.91 | 0.09 | 1820 |
| Phage-60 | F | P | — | W | — | D | W | E | — | Y | A | I | — | D | 0.10 | 1.89 | 0.10 | 1821 |
| Phage-61 | P | D | — | — | — | D | G | — | — | — | L | F | — | T | 0.12 | 1.86 | 0.07 | 1822 |
| Phage-62 | D | N | — | W | — | D | W | E | Y | D | Y | F | — | V | 0.07 | 1.83 | 0.07 | 1823 |
| Phage-63 | I | F | — | W | — | D | W | E | — | F | Y | D | — | Y | 0.12 | 1.82 | 0.08 | 1824 |
| Phage-64 | A | D | — | W | — | D | W | E | — | Y | F | P | — | N | 0.08 | 1.82 | 0.08 | 1825 |
| Phage-65 | H | T | — | W | — | D | W | E | D | D | I | F | — | N | 0.12 | 1.81 | 0.10 | 1826 |
| Phage-66 | F | A | — | W | — | D | W | E | — | A | F | L | — | L | 0.09 | 1.80 | 0.09 | 1827 |
| Phage-67 | Y | D | — | — | — | — | — | — | — | — | I | A | — | D | 0.08 | 1.77 | 0.08 | 1828 |
| Phage-68 | N | S | — | W | — | D | W | E | Y | D | I | I | — | D | 0.08 | 1.77 | 0.10 | 1829 |
| Phage-69 | F | A | — | W | — | D | W | E | — | V | A | P | — | Y | 0.07 | 1.75 | 0.07 | 1830 |
| Phage-70 | L | D | — | — | — | D | G | — | — | T | L | T | — | Y | 0.10 | 1.75 | 0.12 | 1831 |
| Phage-71 | — | L | — | W | — | D | W | E | — | F | Y | D | — | P | 0.07 | 1.74 | 0.09 | 1832 |
| Phage-72 | H | A | — | W | — | V | W | E | — | Y | F | P | — | N | 0.07 | 1.72 | 0.08 | 1833 |
| Phage-73 | N | E | — | W | — | N | G | E | P | T | F | P | — | T | 0.08 | 1.71 | 0.07 | 1834 |
| Phage-74 | L | T | — | — | — | D | G | — | — | T | L | Y | — | D | 0.08 | 1.70 | 0.07 | 1835 |
| Phage-75 | Y | D | — | — | — | — | Y | — | — | — | — | P | — | I | 0.13 | 1.67 | 0.09 | 1836 |
| Phage-76 | I | E | — | W | — | D | W | E | P | N | S | F | — | D | 0.09 | 1.66 | 0.08 | 1837 |
| Phage-77 | Y | D | — | — | — | — | L | — | — | — | I | H | — | Y | 0.12 | 1.66 | 0.09 | 1838 |
| Phage-78 | I | — | — | — | — | — | — | — | — | — | T | I | — | N | 0.08 | 1.63 | 0.08 | 1839 |
| Phage-79 | I | — | — | — | — | — | V | E | — | A | Y | L | — | Y | 0.09 | 1.62 | 0.10 | 1840 |
| Phage-80 | F | D | — | — | — | D | G | — | — | T | — | Y | — | D | 0.09 | 1.61 | 0.08 | 1841 |
| Phage-81 | I | D | — | — | — | D | G | — | — | T | I | S | — | Y | 0.08 | 1.57 | 0.11 | 1842 |
| Phage-82 | N | — | — | — | — | — | — | — | — | — | S | T | — | L | 0.10 | 1.55 | 0.11 | 1843 |
| Phage-83 | Y | D | — | — | — | D | G | — | — | — | Y | F | — | D | 0.08 | 1.53 | 0.08 | 1844 |
| Phage-84 | N | F | — | W | — | D | W | E | Y | F | N | D | — | N | 0.09 | 1.53 | 0.09 | 1845 |
| Phage-85 | — | L | — | W | — | D | W | E | A | F | F | D | — | D | 0.07 | 1.47 | 0.07 | 1846 |
| Phage-86 | I | — | — | — | — | — | W | E | W | P | — | A | — | N | 0.16 | 1.47 | 0.10 | 1847 |
| Phage-87 | — | F | — | W | — | D | W | E | D | N | F | F | — | N | 0.08 | 1.46 | 0.10 | 1848 |
| Phage-88 | — | V | — | W | — | D | W | E | T | F | F | P | — | D | 0.08 | 1.46 | 0.08 | 1849 |
| Phage-89 | D | N | — | — | — | D | G | — | — | T | Y | I | — | N | 0.10 | 1.45 | 0.09 | 1850 |
| Phage-90 | D | N | — | W | — | D | W | E | Y | N | F | F | — | V | 0.07 | 1.45 | 0.08 | 1851 |
| Phage-91 | F | — | — | — | — | — | V | E | — | D | Y | L | — | I | 0.10 | 1.43 | 0.10 | 1852 |
| Phage-92 | D | N | — | W | — | D | W | E | Y | D | I | F | — | V | 0.07 | 1.43 | 0.07 | 1853 |
| Phage-93 | I | D | — | — | — | — | — | — | — | — | I | A | — | P | 0.08 | 1.42 | 0.08 | 1854 |
| Phage-94 | Y | F | — | — | — | — | V | E | — | Y | T | L | — | F | 0.10 | 1.42 | 0.10 | 1855 |
| Phage-95 | F | — | — | — | — | — | — | — | — | — | A | P | — | N | 0.06 | 1.37 | 0.08 | 1856 |
| Phage-96 | F | D | — | — | — | — | V | E | — | Y | F | Y | — | A | 0.11 | 1.36 | 0.08 | 1857 |
| Phage-97 | D | F | — | W | — | D | W | E | D | F | F | F | — | A | 0.18 | 1.35 | 0.12 | 1858 |
| Phage-98 | F | F | — | — | — | D | G | — | — | T | L | S | — | N | 0.08 | 1.35 | 0.09 | 1859 |
| Phage-99 | F | I | — | — | — | — | — | — | — | — | — | A | — | L | 0.14 | 1.35 | 0.09 | 1860 |
| Phage- | Y | D | — | — | — | — | — | — | — | A | I | — | — | Y | 0.09 | 1.32 | 0.10 | 1861 |
| 100 | | | | | | | | | | | | | | | | | | |
| Phage- | Y | I | — | W | — | D | W | E | — | Y | L | Y | — | P | 0.10 | 1.32 | 0.15 | 1862 |
| 101 | | | | | | | | | | | | | | | | | | |
| Phage- | F | D | — | W | — | D | W | E | — | P | T | T | — | H | 0.08 | 1.31 | 0.08 | 1863 |
| 102 | | | | | | | | | | | | | | | | | | |
| Phage- | Y | D | — | W | — | D | W | E | D | F | P | I | — | D | 0.14 | 1.31 | 0.10 | 1864 |
| 103 | | | | | | | | | | | | | | | | | | |
| Phage- | — | V | — | W | — | D | W | E | Y | I | D | D | — | S | 0.08 | 1.30 | 0.07 | 1865 |
| 104 | | | | | | | | | | | | | | | | | | |
| Phage- | I | N | — | W | — | D | W | E | V | I | S | F | — | D | 0.12 | 1.30 | 0.08 | 1866 |
| 105 | | | | | | | | | | | | | | | | | | |
| Phage- | L | S | — | W | — | D | W | E | — | V | T | P | — | L | 0.10 | 1.29 | 0.10 | 1867 |
| 106 | | | | | | | | | | | | | | | | | | |
| Phage- | F | A | — | W | — | D | W | E | — | V | D | I | — | Y | 0.09 | 1,28 | 0.08 | 1868 |
| 107 | | | | | | | | | | | | | | | | | | |
| Phage- | Y | D | — | — | — | — | M | — | — | — | I | V | — | D | 0.10 | 1.25 | 0.08 | 1869 |
| 108 | | | | | | | | | | | | | | | | | | |
| Phage- | Y | D | — | W | — | D | W | E | V | F | I | V | — | D | 0.06 | 1.25 | 0.07 | 1870 |
| 109 | | | | | | | | | | | | | | | | | | |
| Phage- | D | N | — | W | — | D | W | E | H | N | F | F | — | V | 0.10 | 1.25 | 0.08 | 1871 |
| 110 | | | | | | | | | | | | | | | | | | |
| Phage- | Y | D | — | — | — | D | G | — | — | — | I | Y | — | P | 0.07 | 1.23 | 0.08 | 1872 |
| 111 | | | | | | | | | | | | | | | | | | |
| Phage- | Y | D | — | — | — | — | — | E | F | P | Y | Y | — | F | 0.12 | 1.23 | 0.12 | 1873 |
| 112 | | | | | | | | | | | | | | | | | | |
| Phage- | A | D | — | — | — | — | Y | — | — | — | — | P | — | V | 0.11 | 1.22 | 0.09 | 1874 |
| 113 | | | | | | | | | | | | | | | | | | |
| Phage- | F | L | — | — | — | — | V | E | — | V | H | Y | — | S | 0.08 | 1.22 | 0.10 | 1875 |
| 114 | | | | | | | | | | | | | | | | | | |
| Phage- | T | D | — | W | — | D | W | E | Y | I | T | S | — | S | 0.08 | 1.22 | 0.08 | 1876 |
| 115 | | | | | | | | | | | | | | | | | | |
| Phage- | A | F | — | — | — | — | L | — | — | — | I | T | — | D | 0.09 | 1.21 | 0.09 | 1877 |
| 116 | | | | | | | | | | | | | | | | | | |
| Phage- | N | D | — | W | — | D | W | E | — | Y | F | S | — | Y | 0.09 | 1.19 | 0.09 | 1878 |
| 117 | | | | | | | | | | | | | | | | | | |
| Phage- | F | D | — | — | — | — | W | E | T | V | T | D | — | Y | 0.08 | 1.19 | 0.09 | 1879 |
| 118 | | | | | | | | | | | | | | | | | | |
| Phage- | N | L | — | — | — | — | M | — | — | — | I | I | — | P | 0.13 | 1.19 | 0.11 | 1880 |
| 119 | | | | | | | | | | | | | | | | | | |
| Phage- | D | L | — | — | — | — | M | — | — | — | I | Y | — | D | 0.10 | 1.19 | 0.14 | 1881 |
| 120 | | | | | | | | | | | | | | | | | | |
| Phage- | F | D | — | — | — | D | G | V | — | D | Y | I | — | D | 0.09 | 1.18 | 0.09 | 1882 |
| 121 | | | | | | | | | | | | | | | | | | |
| Phage- | Y | A | — | W | — | D | W | E | — | D | F | A | — | Y | 0.11 | 1.18 | 0.08 | 1883 |
| 122 | | | | | | | | | | | | | | | | | | |
| Phage- | H | D | — | — | — | — | M | — | — | — | I | V | — | V | 0.10 | 1.17 | 0.10 | 1884 |
| 123 | | | | | | | | | | | | | | | | | | |
| Phage- | — | F | — | — | — | — | — | E | F | I | F | L | — | A | 0.07 | 1.17 | 0.08 | 1885 |
| 124 | | | | | | | | | | | | | | | | | | |
| Phage- | Y | D | — | — | — | — | L | — | — | — | I | L | — | D | 0.08 | 1.16 | 0.09 | 1886 |
| 125 | | | | | | | | | | | | | | | | | | |
| Phage- | S | V | — | W | — | D | W | E | — | F | Y | S | — | D | 0.11 | 1.16 | 0.10 | 1887 |
| 126 | | | | | | | | | | | | | | | | | | |
| Phage- | P | — | — | — | — | D | G | — | — | T | A | I | — | T | 0.13 | 1.16 | 0.10 | 1888 |
| 127 | | | | | | | | | | | | | | | | | | |
| Phage- | D | D | — | — | — | — | L | E | W | Y | Y | P | — | Y | 0.09 | 1.16 | 0.08 | 1889 |
| 128 | | | | | | | | | | | | | | | | | | |
| Phage- | F | I | — | — | — | — | — | — | — | — | L | P | — | N | 0.08 | 1.14 | 0.09 | 1890 |
| 129 | | | | | | | | | | | | | | | | | | |
| Phage- | T | D | — | — | — | — | — | — | — | — | L | P | — | D | 0.11 | 1.14 | 0.33 | 1891 |
| 130 | | | | | | | | | | | | | | | | | | |
| Phage- | F | L | — | — | — | — | — | E | — | D | A | P | — | Y | 0.08 | 1.13 | 0.08 | 1892 |
| 131 | | | | | | | | | | | | | | | | | | |
| Phage- | I | F | — | — | — | D | G | — | — | T | H | I | — | H | 0.10 | 1.13 | 0.07 | 1893 |
| 132 | | | | | | | | | | | | | | | | | | |
| Phage- | — | F | — | W | — | D | W | E | Y | I | D | F | — | N | 0.10 | 1.11 | 0.21 | 1894 |
| 133 | | | | | | | | | | | | | | | | | | |
| Phage- | I | F | — | — | — | — | Y | — | — | — | L | H | — | I | 0.12 | 1.11 | 0.11 | 1895 |
| 134 | | | | | | | | | | | | | | | | | | |
| Phage- | H | L | — | W | — | D | W | E | W | Y | — | D | — | P | 0.08 | 1.11 | 0.10 | 1896 |
| 135 | | | | | | | | | | | | | | | | | | |
| Phage- | F | I | — | — | — | — | M | — | — | — | I | A | — | N | 0.08 | 1.11 | 0.09 | 1897 |
| 136 | | | | | | | | | | | | | | | | | | |
| Phage- | I | F | — | — | — | — | V | E | M | I | F | L | — | N | 0.09 | 1.10 | 0.08 | 1898 |
| 137 | | | | | | | | | | | | | | | | | | |
| Phage- | Y | D | — | — | — | — | W | E | F | P | — | D | — | I | 0.11 | 1.09 | 0.11 | 1899 |
| 138 | | | | | | | | | | | | | | | | | | |
| Phage- | N | L | — | — | — | — | L | — | — | — | I | T | — | F | 0.10 | 1.09 | 0.08 | 1900 |
| 139 | | | | | | | | | | | | | | | | | | |
| Phage- | F | — | — | — | — | — | V | E | D | F | Y | F | — | Y | 0.08 | 1.09 | 0.08 | 1901 |
| 140 | | | | | | | | | | | | | | | | | | |
| Phage- | D | — | — | — | — | — | — | — | — | — | L | — | — | N | 0.11 | 1.07 | 0.11 | 1902 |
| 141 | | | | | | | | | | | | | | | | | | |
| Phage- | D | — | — | — | — | — | — | — | — | — | L | P | — | D | 0.08 | 1.07 | 0.08 | 1903 |
| 142 | | | | | | | | | | | | | | | | | | |
| Phage- | A | I | — | — | — | — | L | — | — | — | I | A | — | P | 0.09 | 1.07 | 0.09 | 1904 |
| 143 | | | | | | | | | | | | | | | | | | |
| Phage- | — | I | — | — | — | — | V | E | D | Y | N | L | — | Y | 0.08 | 1.07 | 0.09 | 1905 |
| 144 | | | | | | | | | | | | | | | | | | |
| Phage- | H | T | — | W | — | D | W | E | D | Y | T | V | — | P | 0.10 | 1.06 | 0.09 | 1906 |
| 145 | | | | | | | | | | | | | | | | | | |
| Phage- | S | D | — | W | — | D | W | E | Y | F | Y | D | — | N | 0.10 | 1.06 | 0.08 | 1907 |
| 146 | | | | | | | | | | | | | | | | | | |
| Phage- | — | F | — | — | — | D | G | — | — | T | — | H | — | D | 0.09 | 1.05 | 0.08 | 1908 |
| 147 | | | | | | | | | | | | | | | | | | |
| Phage- | D | — | — | — | — | — | Y | — | — | — | — | H | — | I | 0.09 | 1.05 | 0.08 | 1909 |
| 148 | | | | | | | | | | | | | | | | | | |
| Phage- | A | D | — | — | — | D | G | — | — | — | I | I | — | H | 0.07 | 1.05 | 0.08 | 1910 |
| 149 | | | | | | | | | | | | | | | | | | |
| Phage- | F | — | — | — | — | — | L | — | — | — | L | T | — | V | 0.10 | 1.05 | 0.08 | 1911 |
| 150 | | | | | | | | | | | | | | | | | | |
| Phage- | I | L | — | — | — | — | V | E | — | D | Y | Y | — | Y | 0.11 | 1.04 | 0.09 | 1912 |
| 151 | | | | | | | | | | | | | | | | | | |
| Phage- | H | L | — | W | — | D | W | E | — | Y | H | S | — | D | 0.09 | 1.04 | 0.09 | 1913 |
| 152 | | | | | | | | | | | | | | | | | | |
| Phage- | I | F | — | W | — | D | W | E | D | Y | N | F | — | T | 0.08 | 1.04 | 0.11 | 1914 |
| 153 | | | | | | | | | | | | | | | | | | |
| Phage- | I | V | — | — | — | D | G | — | — | T | L | T | — | H | 0.12 | 1.04 | 0.11 | 1915 |
| 154 | | | | | | | | | | | | | | | | | | |
| Phage- | A | D | — | W | — | D | W | E | W | D | Y | T | — | D | 0.12 | 1.03 | 0.11 | 1916 |
| 155 | | | | | | | | | | | | | | | | | | |
| Phage- | I | T | — | — | — | — | — | — | — | — | T | T | — | N | 0.20 | 1.02 | 0.21 | 1917 |
| 156 | | | | | | | | | | | | | | | | | | |
| Phage- | Y | H | — | W | — | D | W | E | — | Y | T | S | — | D | 0.20 | 1.02 | 0.09 | 1918 |
| 157 | | | | | | | | | | | | | | | | | | |
| Phage- | N | — | — | — | — | — | V | E | — | Y | A | L | — | T | 0.11 | 1.01 | 0.10 | 1919 |
| 158 | | | | | | | | | | | | | | | | | | |
| Phage- | F | I | — | — | — | — | M | — | — | — | I | H | — | D | 0.15 | 1.00 | 0.19 | 1920 |
| 159 | | | | | | | | | | | | | | | | | | |
| Phage- | D | N | — | W | — | D | W | E | — | F | A | V | — | P | 0.14 | 1.00 | 0.10 | 1921 |
| 160 | | | | | | | | | | | | | | | | | | |
| Phage- | Y | D | — | — | — | — | L | — | — | T | — | V | — | D | 0.10 | 1.00 | 0.09 | 1922 |
| 161 | | | | | | | | | | | | | | | | | | |
| Phage- | Y | D | — | — | — | — | — | — | — | — | I | A | — | Y | 0.08 | 0.99 | 0.08 | 1923 |
| 162 | | | | | | | | | | | | | | | | | | |
| Phage- | I | D | — | W | — | D | W | E | Y | T | — | H | — | D | 0.07 | 0.97 | 0.09 | 1924 |
| 163 | | | | | | | | | | | | | | | | | | |
| Phage- | D | D | — | — | — | — | L | — | — | — | I | I | — | I | 0.09 | 0.96 | 0.09 | 1925 |
| 164 | | | | | | | | | | | | | | | | | | |
| Phage- | — | — | — | — | — | — | Y | — | — | — | S | F | — | F | 0.09 | 0.91 | 0.08 | 1926 |
| 165 | | | | | | | | | | | | | | | | | | |
| Phage- | F | N | — | W | — | D | W | E | D | P | Y | F | — | V | 0.09 | 0.86 | 0.07 | 1927 |
| 166 | | | | | | | | | | | | | | | | | | |
| Phage- | Y | D | — | — | — | — | Y | — | — | — | S | Y | — | S | 0.08 | 0.82 | 0.07 | 1928 |
| 167 | | | | | | | | | | | | | | | | | | |
| Phage- | — | A | — | W | — | D | W | E | Y | T | D | S | — | F | 0.13 | 0.79 | 0.09 | 1929 |
| 168 | | | | | | | | | | | | | | | | | | |
| Phage- | T | D | — | — | — | — | — | — | — | — | — | A | — | Y | 0.10 | 0.77 | 0.09 | 1930 |
| 169 | | | | | | | | | | | | | | | | | | |
| Phage- | T | D | — | W | — | D | W | E | F | Y | A | D | — | D | 0.07 | 0.75 | 0.08 | 1931 |
| 170 | | | | | | | | | | | | | | | | | | |
| Phage- | Y | D | — | — | — | — | L | — | — | — | — | I | — | H | 0.09 | 0.69 | 0.09 | 1932 |
| 171 | | | | | | | | | | | | | | | | | | |
| Phage- | S | D | — | — | — | D | G | — | — | — | I | I | — | T | 0.07 | 0.69 | 0.07 | 1933 |
| 172 | | | | | | | | | | | | | | | | | | |
| Phage- | Y | — | — | — | — | — | — | — | — | — | I | D | — | D | 0.08 | 0.67 | 0.09 | 1934 |
| 173 | | | | | | | | | | | | | | | | | | |
| Phage- | F | F | — | — | — | — | I | — | — | — | I | A | — | V | 0.08 | 0.62 | 0.09 | 1935 |
| 174 | | | | | | | | | | | | | | | | | | |
| Phage- | D | — | — | — | — | — | — | — | — | — | T | F | — | D | 0.16 | 0.60 | 0.10 | 1936 |
| 175 | | | | | | | | | | | | | | | | | | |
| Phage- | Y | D | — | — | — | — | W | E | W | P | I | D | — | V | 0.10 | 0.59 | 0.10 | 1937 |
| 176 | | | | | | | | | | | | | | | | | | |
| Phage- | F | — | — | — | — | — | T | E | L | F | S | F | — | Y | 0.13 | 0.59 | 0.11 | 1938 |
| 177 | | | | | | | | | | | | | | | | | | |
| Phage- | Y | — | — | — | — | — | V | — | — | — | I | T | — | P | 0.15 | 0.42 | 0.11 | 1939 |
| 178 | | | | | | | | | | | | | | | | | | |
| Phage- | I | L | — | — | — | — | — | — | — | — | I | N | — | N | 0.09 | 0.37 | 0.25 | 1940 |
| 179 | | | | | | | | | | | | | | | | | | |
| Phage- | — | V | — | — | — | A | M | G | Q | H | Y | L | — | D | 0.08 | 0.09 | 0.08 | 1941 |
| 180 | | | | | | | | | | | | | | | | | | |
| Phage- | — | V | — | — | T | K | M | G | — | H | Y | L | — | S | 0.08 | 0.08 | 0.08 | 1942 |
| 181 | | | | | | | | | | | | | | | | | | |
| Phage- | Y | D | — | W | — | D | W | E | Y | V | Y | A | — | Y | 0.08 | 0.98 | 0.08 | 1943 |
| 182 | | | | | | | | | | | | | | | | | | |
| Phage- | D | L | — | — | — | — | L | — | — | — | — | N | — | D | 0.09 | 0.98 | 0.08 | 1944 |
| 183 | | | | | | | | | | | | | | | | | | |
| Phage- | Y | — | — | — | — | — | — | — | — | — | T | V | — | Y | 0.14 | 0.97 | 0.16 | 1945 |
| 184 | | | | | | | | | | | | | | | | | | |
| Phage- | L | D | — | W | — | D | W | E | W | P | Y | S | — | N | 0.08 | 0.96 | 0.09 | 1946 |
| 185 | | | | | | | | | | | | | | | | | | |
| Phage- | F | I | — | W | — | D | W | E | D | D | F | F | — | Y | 0.08 | 0.96 | 0.09 | 1947 |
| 186 | | | | | | | | | | | | | | | | | | |
| Phage- | D | L | — | — | — | — | V | E | W | Y | F | F | — | N | 0.11 | 0.95 | 0.10 | 1948 |
| 187 | | | | | | | | | | | | | | | | | | |
| Phage- | Y | D | — | — | — | — | L | — | — | — | I | V | — | F | 0.07 | 0.94 | 0.08 | 1949 |
| 188 | | | | | | | | | | | | | | | | | | |
| Phage- | L | N | — | W | — | V | W | E | D | D | — | F | — | Y | 0.09 | 0.92 | 0.09 | 1950 |
| 189 | | | | | | | | | | | | | | | | | | |
| Phage- | F | N | — | W | — | D | W | E | D | P | N | F | — | V | 0.09 | 0.91 | 0.09 | 1951 |
| 190 | | | | | | | | | | | | | | | | | | |
| Phage- | — | I | — | W | — | D | W | E | D | D | Y | F | — | P | 0.10 | 0.91 | 0.13 | 1952 |
| 191 | | | | | | | | | | | | | | | | | | |
| Phage- | F | L | — | — | — | — | — | — | — | — | S | V | — | Y | 0.10 | 0.91 | 0.08 | 1953 |
| 192 | | | | | | | | | | | | | | | | | | |
| Phage- | Y | D | I | — | — | — | L | — | — | — | I | F | — | Y | 0.10 | 0.91 | 0.09 | 1954 |
| 193 | | | | | | | | | | | | | | | | | | |
| Phage- | H | L | — | — | — | D | G | — | — | — | F | T | — | F | 0.11 | 0.90 | 0.10 | 1955 |
| 194 | | | | | | | | | | | | | | | | | | |
| Phage- | Y | F | — | — | — | — | M | — | — | — | L | Y | — | I | 0.08 | 0.90 | 0.08 | 1956 |
| 195 | | | | | | | | | | | | | | | | | | |
| Phage- | Y | — | — | — | — | — | V | E | — | Y | A | N | — | Y | 0.07 | 0.90 | 0.07 | 1957 |
| 196 | | | | | | | | | | | | | | | | | | |
| Phage- | N | T | — | — | — | — | — | — | — | — | T | A | — | Y | 0.16 | 0.90 | 0.58 | 1958 |
| 197 | | | | | | | | | | | | | | | | | | |
| Phage- | I | D | — | W | — | D | W | E | — | A | F | N | — | Y | 0.09 | 0.90 | 0.08 | 1959 |
| 198 | | | | | | | | | | | | | | | | | | |
| Phage- | A | — | — | — | — | — | L | E | — | F | F | L | — | T | 0.09 | 0.89 | 0.08 | 1960 |
| 199 | | | | | | | | | | | | | | | | | | |
| Phage- | I | — | — | — | — | — | V | E | — | V | H | H | — | Y | 0.08 | 0.89 | 0.08 | 1961 |
| 200 | | | | | | | | | | | | | | | | | | |
| Phage- | F | F | — | — | — | — | — | — | — | — | — | A | — | D | 0.10 | 0.89 | 0.11 | 1962 |
| 201 | | | | | | | | | | | | | | | | | | |
| Phage- | Y | D | — | — | — | — | L | — | — | T | I | I | — | Amino acid position sequence | 0.08 | 0.89 | 0.08 | 1963 |
| 202 | | | | | | | | | | | | | | | | | | |
| Phage- | I | L | — | — | — | — | W | E | Y | P | L | D | — | S | 0.09 | 0.89 | 0.10 | 1964 |
| 203 | | | | | | | | | | | | | | | | | | |
| Phage- | F | I | — | — | — | — | — | — | — | — | T | — | — | N | 0.09 | 0.88 | 0.10 | 1965 |
| 204 | | | | | | | | | | | | | | | | | | |
| Phage- | F | — | — | — | — | — | L | — | — | — | — | S | — | D | 0.17 | 0.88 | 0.15 | 1966 |
| 205 | | | | | | | | | | | | | | | | | | |
| Phage- | H | L | — | — | — | — | L | — | — | — | — | T | — | F | 0.10 | 0.87 | 0.10 | 1967 |
| 206 | | | | | | | | | | | | | | | | | | |
| Phage- | L | I | — | — | — | — | V | E | D | Y | S | L | — | H | 0.09 | 0.87 | 0.09 | 1968 |
| 207 | | | | | | | | | | | | | | | | | | |
| Phage- | Y | F | — | — | — | — | M | — | — | — | — | Y | — | D | 0.08 | 0.87 | 0.08 | 1969 |
| 208 | | | | | | | | | | | | | | | | | | |
| Phage- | H | — | — | — | — | — | M | — | — | — | I | Y | — | I | 0.13 | 0.87 | 0.09 | 1970 |
| 209 | | | | | | | | | | | | | | | | | | |
| Phage- | F | D | — | — | — | — | L | — | — | — | I | N | — | D | 0.08 | 0.87 | 0.09 | 1971 |
| 210 | | | | | | | | | | | | | | | | | | |
| Phage- | Y | — | — | — | — | — | V | E | — | Y | I | Y | — | T | 0.07 | 0.87 | 0.08 | 1972 |
| 211 | | | | | | | | | | | | | | | | | | |
| Phage- | L | A | — | W | — | V | R | E | — | I | N | A | — | I | 0.08 | 0.85 | 0.07 | 1973 |
| 212 | | | | | | | | | | | | | | | | | | |
| Phage- | I | D | — | W | — | D | W | E | D | I | T | F | — | D | 0.08 | 0.85 | 0.08 | 1974 |
| 213 | | | | | | | | | | | | | | | | | | |
| Phage- | I | V | — | — | — | — | L | I | — | — | I | T | — | P | 0.11 | 0.85 | 0.15 | 1975 |
| 214 | | | | | | | | | | | | | | | | | | |
| Phage- | F | — | — | — | — | — | — | E | L | P | A | D | — | D | 0.08 | 0.85 | 0.09 | 1976 |
| 215 | | | | | | | | | | | | | | | | | | |
| Phage- | F | D | — | — | — | — | — | — | — | — | N | P | — | F | 0.10 | 0.85 | 0.09 | 1977 |
| 216 | | | | | | | | | | | | | | | | | | |
| Phage- | D | A | — | W | — | D | W | E | — | Y | S | S | — | D | 0.10 | 0.83 | 0.10 | 1978 |
| 217 | | | | | | | | | | | | | | | | | | |
| Phage- | D | H | — | W | — | D | W | E | P | N | Y | F | — | V | 0.08 | 0.83 | 0.09 | 1979 |
| 218 | | | | | | | | | | | | | | | | | | |
| Phage- | D | — | — | W | — | D | W | E | I | N | Y | I | — | F | 0.09 | 0.83 | 0.10 | 1980 |
| 219 | | | | | | | | | | | | | | | | | | |
| Phage- | I | — | — | W | — | D | W | E | Y | V | Y | A | — | N | 0.10 | 0.82 | 0.09 | 1981 |
| 220 | | | | | | | | | | | | | | | | | | |
| Phage- | D | F | — | — | — | — | V | E | — | D | Y | L | — | D | 0.07 | 0.82 | 0.08 | 1982 |
| 221 | | | | | | | | | | | | | | | | | | |
| Phage- | H | D | — | — | — | D | G | R | — | D | Y | D | — | A | 0.11 | 0.82 | 0.09 | 1983 |
| 222 | | | | | | | | | | | | | | | | | | |
| Phage- | L | A | — | W | — | D | W | E | D | D | Y | F | — | V | 0.08 | 0.82 | 0.09 | 1984 |
| 223 | | | | | | | | | | | | | | | | | | |
| Phage- | D | I | — | W | — | D | W | E | D | Y | L | P | — | V | 0.10 | 0.82 | 0.10 | 1985 |
| 224 | | | | | | | | | | | | | | | | | | |
| Phage- | I | L | — | — | — | — | I | E | V | Y | A | L | — | P | 0.08 | 0.81 | 0.10 | 1986 |
| 225 | | | | | | | | | | | | | | | | | | |
| Phage- | I | F | — | — | — | — | W | E | F | — | — | L | — | N | 0.10 | 0.81 | 0.11 | 1987 |
| 226 | | | | | | | | | | | | | | | | | | |
| Phage- | T | — | — | — | — | — | V | E | D | F | S | L | — | V | 0.07 | 0.80 | 0.08 | 1988 |
| 227 | | | | | | | | | | | | | | | | | | |
| Phage- | F | I | — | — | — | — | W | E | F | V | D | A | — | F | 0.11 | 0.80 | 0.09 | 1989 |
| 228 | | | | | | | | | | | | | | | | | | |
| Phage- | F | A | — | W | — | D | W | E | — | D | S | P | — | D | 0.06 | 0.80 | 0.07 | 1990 |
| 229 | | | | | | | | | | | | | | | | | | |
| Phage- | I | L | — | — | — | — | V | E | — | L | I | F | — | P | 0.12 | 0.80 | 0.08 | 1991 |
| 230 | | | | | | | | | | | | | | | | | | |
| Phage- | F | — | — | — | — | — | V | E | — | Y | I | Y | — | Y | 0.08 | 0.80 | 0.08 | 1992 |
| 231 | | | | | | | | | | | | | | | | | | |
| Phage- | D | S | — | — | — | — | L | — | — | — | I | I | — | D | 0.10 | 0.79 | 0.09 | 1993 |
| 232 | | | | | | | | | | | | | | | | | | |
| Phage- | F | L | — | — | — | D | G | — | — | T | S | V | — | D | 0.11 | 0.79 | 0.08 | 1994 |
| 233 | | | | | | | | | | | | | | | | | | |
| Phage- | F | N | — | W | — | N | G | E | P | T | Y | F | — | V | 0.11 | 0.79 | 0.08 | 1995 |
| 234 | | | | | | | | | | | | | | | | | | |
| Phage- | L | A | — | W | — | V | W | E | Y | P | — | T | — | I | 0.09 | 0.78 | 0.09 | 1996 |
| 235 | | | | | | | | | | | | | | | | | | |
| Phage- | D | — | — | — | — | — | V | E | — | D | — | Y | — | Y | 0.09 | 0.78 | 0.09 | 1997 |
| 236 | | | | | | | | | | | | | | | | | | |
| Phage- | I | T | — | W | — | D | W | E | — | Y | A | N | — | T | 0.08 | 0.77 | 0.07 | 1998 |
| 237 | | | | | | | | | | | | | | | | | | |
| Phage- | F | F | — | — | — | D | G | — | — | T | Y | S | — | I | 0.15 | 0.77 | 0.13 | 1999 |
| 238 | | | | | | | | | | | | | | | | | | |
| Phage- | T | D | — | W | — | D | W | E | Y | A | T | S | — | D | 0.09 | 0.76 | 0.09 | 2000 |
| 239 | | | | | | | | | | | | | | | | | | |
| Phage- | F | N | — | — | — | D | G | Y | — | D | Y | L | — | D | 0.10 | 0.76 | 0.11 | 2001 |
| 240 | | | | | | | | | | | | | | | | | | |
| Phage- | Y | D | — | W | — | D | W | E | V | D | F | H | — | P | 0.11 | 0.76 | 0.08 | 2002 |
| 241 | | | | | | | | | | | | | | | | | | |
| Phage- | N | I | — | W | — | D | W | E | D | D | S | F | — | F | 0.08 | 0.76 | 0.08 | 2003 |
| 242 | | | | | | | | | | | | | | | | | | |
| Phage- | A | T | — | — | — | — | — | — | — | — | I | — | — | S | 0.13 | 0.75 | 0.09 | 2004 |
| 243 | | | | | | | | | | | | | | | | | | |
| Phage- | S | — | — | — | — | — | — | — | — | — | T | F | — | D | 0.10 | 0.74 | 0.09 | 2005 |
| 244 | | | | | | | | | | | | | | | | | | |
| Phage- | P | I | — | — | — | — | Y | — | — | — | D | V | — | A | 0.08 | 0.74 | 0.08 | 2006 |
| 245 | | | | | | | | | | | | | | | | | | |
| Phage- | Y | — | — | — | — | D | G | — | — | Y | N | S | — | I | 0.11 | 0.74 | 0.11 | 2007 |
| 246 | | | | | | | | | | | | | | | | | | |
| Phage- | — | D | — | W | — | D | W | E | V | F | I | A | — | D | 0.11 | 0.74 | 0.10 | 2008 |
| 247 | | | | | | | | | | | | | | | | | | |
| Phage- | D | L | — | — | — | — | V | E | — | V | N | L | — | L | 0.12 | 0.74 | 0.10 | 2009 |
| 248 | | | | | | | | | | | | | | | | | | |
| Phage- | F | D | — | — | — | — | M | — | — | — | T | T | — | F | 0.09 | 0.74 | 0.09 | 2010 |
| 249 | | | | | | | | | | | | | | | | | | |
| Phage- | N | F | — | W | — | D | W | E | P | I | Y | F | — | T | 0.13 | 0.74 | 0.14 | 2011 |
| 250 | | | | | | | | | | | | | | | | | | |
| Phage- | — | D | — | — | — | D | G | — | — | — | F | F | — | L | 0.08 | 0.73 | 0.08 | 2012 |
| 251 | | | | | | | | | | | | | | | | | | |
| Phage- | — | D | — | — | — | D | G | — | — | T | A | F | — | I | 0.10 | 0.73 | 0.09 | 2013 |
| 252 | | | | | | | | | | | | | | | | | | |
| Phage- | N | I | — | — | — | — | M | — | — | — | L | V | — | I | 0.10 | 0.73 | 0.09 | 2014 |
| 253 | | | | | | | | | | | | | | | | | | |
| Phage- | I | I | — | — | — | — | — | — | — | — | F | F | — | F | 0.08 | 0.73 | 0.09 | 2015 |
| 254 | | | | | | | | | | | | | | | | | | |
| Phage- | N | F | — | — | — | — | Y | — | — | — | I | S | — | I | 0.10 | 0.73 | 0.38 | 2016 |
| 255 | | | | | | | | | | | | | | | | | | |
| Phage- | H | L | — | — | — | — | I | E | — | A | D | — | — | N | 0.11 | 0.73 | 0.51 | 2017 |
| 256 | | | | | | | | | | | | | | | | | | |
| Phage- | D | — | — | — | — | — | V | E | — | D | Y | L | — | D | 0.08 | 0.72 | 0.09 | 2018 |
| 257 | | | | | | | | | | | | | | | | | | |
| Phage- | D | — | — | — | — | — | L | — | — | — | I | N | — | D | 0.11 | 0.72 | 0.10 | 2019 |
| 258 | | | | | | | | | | | | | | | | | | |
| Phage- | F | — | — | — | — | — | L | — | — | — | L | F | — | V | 0.09 | 0.72 | 0.08 | 2020 |
| 259 | | | | | | | | | | | | | | | | | | |
| Phage- | P | D | — | — | — | — | W | E | F | Y | — | T | — | N | 0.12 | 0.72 | 0.08 | 2021 |
| 260 | | | | | | | | | | | | | | | | | | |
| Phage- | F | D | — | — | — | — | — | E | Y | I | Y | A | — | T | 0.09 | 0.72 | 0.08 | 2022 |
| 261 | | | | | | | | | | | | | | | | | | |
| Phage- | D | — | — | — | — | — | — | — | — | — | S | I | — | N | 0.12 | 0.72 | 0.11 | 2023 |
| 262 | | | | | | | | | | | | | | | | | | |
| Phage- | D | F | — | — | — | — | V | E | — | Y | I | F | — | F | 0.08 | 0.72 | 0.07 | 2024 |
| 263 | | | | | | | | | | | | | | | | | | |
| Phage- | P | V | — | W | — | D | W | E | Y | V | S | S | — | D | 0.08 | 0.71 | 0.08 | 2025 |
| 264 | | | | | | | | | | | | | | | | | | |
| Phage- | Y | I | — | — | — | — | R | — | — | — | N | L | — | L | 0.09 | 0.71 | 0.09 | 2026 |
| 265 | | | | | | | | | | | | | | | | | | |
| Phage- | Y | D | — | — | — | — | L | — | — | — | I | V | — | D | 0.11 | 0.71 | 0.11 | 2027 |
| 266 | | | | | | | | | | | | | | | | | | |
| Phage- | H | D | — | W | — | D | W | E | D | F | Y | F | — | V | 0.09 | 0.71 | 0.08 | 2028 |
| 267 | | | | | | | | | | | | | | | | | | |
| Phage- | H | — | — | — | — | — | Y | — | — | — | I | D | — | Y | 0.12 | 0.71 | 0.10 | 2029 |
| 268 | | | | | | | | | | | | | | | | | | |
| Phage- | L | F | — | — | — | — | M | P | — | D | I | F | — | N | 0.08 | 0.71 | 0.08 | 2030 |
| 269 | | | | | | | | | | | | | | | | | | |
| Phage- | H | D | — | — | — | — | L | E | F | H | Y | A | — | Y | 0.10 | 0.71 | 0.12 | 2031 |
| 270 | | | | | | | | | | | | | | | | | | |
| Phage- | D | F | — | — | — | — | L | — | — | — | — | N | — | F | 0.08 | 0.70 | 0.08 | 2032 |
| 271 | | | | | | | | | | | | | | | | | | |
| Phage- | Y | F | — | — | — | — | L | — | — | — | I | A | — | N | 0.10 | 0.70 | 0.10 | 2033 |
| 272 | | | | | | | | | | | | | | | | | | |
| Phage- | T | D | — | W | — | D | W | E | D | D | T | I | — | D | 0.10 | 0.70 | 0.08 | 2034 |
| 273 | | | | | | | | | | | | | | | | | | |
| Phage- | Y | D | — | — | — | — | L | — | — | — | I | Y | — | F | 0.09 | 0.70 | 0.08 | 2035 |
| 274 | | | | | | | | | | | | | | | | | | |
| Phage- | Y | — | — | W | — | D | W | W | — | Y | — | T | — | D | 0.10 | 0.70 | 0.11 | 2036 |
| 275 | | | | | | | | | | | | | | | | | | |
| Phage- | P | I | — | — | — | — | L | E | — | — | Y | L | — | N | 0.13 | 0.69 | 0.52 | 2037 |
| 276 | | | | | | | | | | | | | | | | | | |
| Phage- | F | D | — | — | — | — | — | — | — | — | I | V | — | Y | 0.12 | 0.69 | 0.11 | 2038 |
| 277 | | | | | | | | | | | | | | | | | | |
| Phage- | — | L | — | — | — | D | G | I | — | F | F | D | — | P | 0.09 | 0.68 | 0.07 | 2039 |
| 278 | | | | | | | | | | | | | | | | | | |
| Phage- | A | — | — | — | — | — | Y | — | — | — | L | T | — | V | 0.07 | 0.68 | 0.07 | 2040 |
| 279 | | | | | | | | | | | | | | | | | | |
| Phage- | D | F | — | — | — | — | L | — | — | — | I | I | — | A | 0.14 | 0.68 | 0.14 | 2041 |
| 280 | | | | | | | | | | | | | | | | | | |
| Phage- | Y | D | — | — | — | — | — | — | — | — | L | D | — | N | 0.08 | 0.68 | 0.08 | 2042 |
| 281 | | | | | | | | | | | | | | | | | | |
| Phage- | A | I | — | — | — | — | — | — | — | — | — | A | — | D | 0.14 | 0.67 | 0.08 | 2043 |
| 282 | | | | | | | | | | | | | | | | | | |
| Phage- | L | L | — | — | — | D | G | V | — | D | F | F | — | D | 0.10 | 0.67 | 0.10 | 2044 |
| 283 | | | | | | | | | | | | | | | | | | |
| Phage- | N | F | — | — | — | — | L | P | — | D | I | F | — | F | 0.12 | 0.66 | 0.13 | 2045 |
| 284 | | | | | | | | | | | | | | | | | | |
| Phage- | F | — | — | — | — | — | V | E | — | V | S | L | — | N | 0.08 | 0.66 | 0.08 | 2046 |
| 285 | | | | | | | | | | | | | | | | | | |
| Phage- | Y | D | — | — | — | D | G | Y | — | A | F | Y | — | H | 0.12 | 0.66 | 0.10 | 2047 |
| 286 | | | | | | | | | | | | | | | | | | |
| Phage- | N | F | — | — | — | — | T | E | F | D | Y | L | — | D | 0.08 | 0.65 | 0.08 | 2048 |
| 287 | | | | | | | | | | | | | | | | | | |
| Phage- | D | — | — | — | — | D | G | V | — | D | F | I | — | N | 0.06 | 0.65 | 0.08 | 2049 |
| 288 | | | | | | | | | | | | | | | | | | |
| Phage- | T | D | — | W | — | D | W | E | Y | I | Y | S | — | S | 0.08 | 0.65 | 0.07 | 2050 |
| 289 | | | | | | | | | | | | | | | | | | |
| Phage- | F | — | — | — | — | — | — | E | — | I | T | N | — | I | 0.14 | 0.65 | 0.11 | 2051 |
| 290 | | | | | | | | | | | | | | | | | | |
| Phage- | F | D | — | W | — | D | W | E | — | — | F | F | — | H | 0.07 | 0.64 | 0.08 | 2052 |
| 291 | | | | | | | | | | | | | | | | | | |
| Phage- | D | F | — | — | — | D | G | — | — | — | — | F | — | P | 0.08 | 0.63 | 0.08 | 2053 |
| 292 | | | | | | | | | | | | | | | | | | |
| Phage- | H | N | — | — | — | — | L | — | — | — | L | V | — | D | 0.13 | 0.63 | 0.09 | 2054 |
| 293 | | | | | | | | | | | | | | | | | | |
| Phage- | T | — | — | — | — | D | G | A | — | D | Y | T | — | D | 0.07 | 0.63 | 0.07 | 2055 |
| 294 | | | | | | | | | | | | | | | | | | |
| Phage- | F | D | — | — | — | — | — | E | F | P | — | I | — | F | 0.08 | 0.62 | 0.08 | 2056 |
| 295 | | | | | | | | | | | | | | | | | | |
| Phage- | Y | N | — | — | — | — | L | — | — | — | — | T | — | D | 0.09 | 0.62 | 0.08 | 2057 |
| 296 | | | | | | | | | | | | | | | | | | |
| Phage- | F | D | — | — | — | — | L | — | — | — | I | H | — | A | 0.07 | 0.62 | 0.08 | 2058 |
| 297 | | | | | | | | | | | | | | | | | | |
| Phage- | D | I | — | — | — | — | V | E | — | Y | F | L | — | F | 0.15 | 0.61 | 0.10 | 2059 |
| 298 | | | | | | | | | | | | | | | | | | |
| Phage- | F | D | — | — | — | — | V | — | — | — | L | T | — | F | 0.10 | 0.61 | 0.09 | 2060 |
| 299 | | | | | | | | | | | | | | | | | | |
| Phage- | F | D | — | — | — | — | I | E | — | F | H | L | — | F | 0.08 | 0.61 | 0.08 | 2061 |
| 300 | | | | | | | | | | | | | | | | | | |
| Phage- | A | — | — | — | — | — | L | — | — | — | I | I | — | D | 0.12 | 0.61 | 0.10 | 2062 |
| 301 | | | | | | | | | | | | | | | | | | |
| Phage- | Y | N | — | — | — | — | L | — | — | — | I | T | — | N | 0.09 | 0.61 | 0.10 | 2063 |
| 302 | | | | | | | | | | | | | | | | | | |
| Phage- | F | D | — | W | — | D | W | E | — | P | — | D | — | L | 0.08 | 0.61 | 0.07 | 2064 |
| 303 | | | | | | | | | | | | | | | | | | |
| Phage- | D | V | — | — | — | — | L | — | — | — | I | L | — | P | 0.08 | 0.60 | 0.08 | 2065 |
| 304 | | | | | | | | | | | | | | | | | | |
| Phage- | N | — | — | — | — | — | L | — | — | — | L | P | — | P | 0.09 | 0.60 | 0.08 | 2066 |
| 305 | | | | | | | | | | | | | | | | | | |
| Phage- | Y | — | — | W | — | D | W | E | Y | D | I | F | — | S | 0.08 | 0.60 | 0.10 | 2067 |
| 306 | | | | | | | | | | | | | | | | | | |
| Phage- | D | D | — | — | — | — | — | — | — | — | T | Y | — | N | 0.08 | 0.60 | 0.09 | 2068 |
| 307 | | | | | | | | | | | | | | | | | | |
| Phage- | F | — | — | — | — | — | — | E | — | V | F | H | — | Y | 0.09 | 0.60 | 0.09 | 2069 |
| 308 | | | | | | | | | | | | | | | | | | |
| Phage- | T | D | — | W | — | D | W | E | — | Y | F | L | — | D | 0.07 | 0.60 | 0.09 | 2070 |
| 309 | | | | | | | | | | | | | | | | | | |
| Phage- | — | — | — | — | — | — | W | E | — | — | Y | L | — | P | 0.09 | 0.60 | 0.09 | 2071 |
| 310 | | | | | | | | | | | | | | | | | | |
| Phage- | D | D | — | I | — | N | G | Y | A | T | F | I | — | Y | 0.06 | 0.59 | 0.08 | 2072 |
| 311 | | | | | | | | | | | | | | | | | | |
| Phage- | F | L | — | — | — | — | I | E | D | D | T | H | — | Y | 0.16 | 0.59 | 0.38 | 2073 |
| 312 | | | | | | | | | | | | | | | | | | |
| Phage- | F | A | — | W | — | D | W | E | — | T | I | P | — | H | 0.08 | 0.59 | 0.08 | 2074 |
| 313 | | | | | | | | | | | | | | | | | | |
| Phage- | — | L | — | — | — | — | — | — | — | — | Y | N | — | Y | 0.10 | 0.58 | 0.08 | 2075 |
| 314 | | | | | | | | | | | | | | | | | | |
| Phage- | Y | D | — | — | — | — | — | — | — | — | I | S | — | I | 0.09 | 0.58 | 0.09 | 2076 |
| 315 | | | | | | | | | | | | | | | | | | |
| Phage- | Y | D | — | — | — | — | — | — | — | — | — | N | — | Y | 0.12 | 0.57 | 0.10 | 2077 |
| 316 | | | | | | | | | | | | | | | | | | |
| Phage- | A | I | — | W | — | D | W | E | — | F | — | D | — | Y | 0.10 | 0.57 | 0.09 | 2078 |
| 317 | | | | | | | | | | | | | | | | | | |
| Phage- | L | T | — | W | — | V | R | E | — | I | F | A | — | D | 0.07 | 0.57 | 0.08 | 2079 |
| 318 | | | | | | | | | | | | | | | | | | |
| Phage- | — | L | — | — | — | — | — | — | — | — | Y | Y | — | N | 0.09 | 0.57 | 0.09 | 2080 |
| 319 | | | | | | | | | | | | | | | | | | |
| Phage- | N | V | — | — | — | — | Y | — | — | — | A | P | — | N | 0.07 | 0.56 | 0.08 | 2081 |
| 320 | | | | | | | | | | | | | | | | | | |
| Phage- | H | D | — | — | — | — | — | — | — | — | I | S | — | V | 0.11 | 0.55 | 0.09 | 2082 |
| 321 | | | | | | | | | | | | | | | | | | |
| Phage- | F | D | — | — | — | — | L | — | — | T | — | D | — | N | 0.12 | 0.55 | 0.41 | 2083 |
| 322 | | | | | | | | | | | | | | | | | | |
| Phage- | Y | F | — | — | — | — | V | E | — | H | F | Y | — | Y | 0.09 | 0.55 | 0.08 | 2084 |
| 323 | | | | | | | | | | | | | | | | | | |
| Phage- | D | — | — | — | — | — | L | — | — | — | I | I | — | H | 0.09 | 0.54 | 0.09 | 2085 |
| 324 | | | | | | | | | | | | | | | | | | |
| Phage- | D | D | — | — | — | — | V | P | — | D | I | T | — | Y | 0.11 | 0.54 | 0.08 | 2086 |
| 325 | | | | | | | | | | | | | | | | | | |
| Phage- | D | N | — | — | — | — | L | — | — | — | — | V | — | D | 0.10 | 0.54 | 0.08 | 2087 |
| 326 | | | | | | | | | | | | | | | | | | |
| Phage- | — | H | — | W | — | D | W | E | P | N | Y | V | — | D | 0.10 | 0.54 | 0.08 | 2088 |
| 327 | | | | | | | | | | | | | | | | | | |
| Phage- | D | — | — | — | — | — | L | — | — | — | L | F | — | L | 0.09 | 0.53 | 0.09 | 2089 |
| 328 | | | | | | | | | | | | | | | | | | |
| Phage- | D | D | — | — | — | — | L | — | — | — | — | V | — | A | 0.08 | 0.53 | 0.11 | 2090 |
| 329 | | | | | | | | | | | | | | | | | | |
| Phage- | A | A | — | — | — | — | L | — | — | — | I | V | — | D | 0.13 | 0.53 | 0.09 | 2091 |
| 330 | | | | | | | | | | | | | | | | | | |
| Phage- | D | F | — | — | — | — | — | E | — | I | N | N | — | F | 0.14 | 0.52 | 0.48 | 2092 |
| 331 | | | | | | | | | | | | | | | | | | |
| Phage- | Y | — | — | — | — | — | — | — | — | — | N | A | — | Y | 0.08 | 0.52 | 0.07 | 2093 |
| 332 | | | | | | | | | | | | | | | | | | |
| Phage- | — | L | — | — | — | — | — | — | — | — | N | S | — | Y | 0.10 | 0.52 | 0.11 | 2094 |
| 333 | | | | | | | | | | | | | | | | | | |
| Phage- | Y | D | — | — | — | — | — | — | — | — | I | D | — | D | 0.09 | 0.52 | 0.09 | 2095 |
| 334 | | | | | | | | | | | | | | | | | | |
| Phage- | D | S | — | — | — | — | — | E | F | Y | Y | V | — | F | 0.11 | 0.52 | 0.14 | 2096 |
| 335 | | | | | | | | | | | | | | | | | | |
| Phage- | Y | I | — | — | — | — | L | — | — | — | L | I | — | H | 0.10 | 0.52 | 0.08 | 2097 |
| 336 | | | | | | | | | | | | | | | | | | |
| Phage- | F | D | — | — | — | — | V | E | — | D | Y | F | — | Y | 0.11 | 0.52 | 0.10 | 2098 |
| 337 | | | | | | | | | | | | | | | | | | |
| Phage- | F | D | — | — | — | — | Y | — | — | — | L | Y | — | F | 0.08 | 0.52 | 0.07 | 2099 |
| 338 | | | | | | | | | | | | | | | | | | |
| Phage- | — | L | — | — | — | D | G | — | — | Y | S | F | — | H | 0.10 | 0.51 | 0.10 | 2100 |
| 339 | | | | | | | | | | | | | | | | | | |
| Phage- | I | P | — | — | — | — | M | — | — | — | — | V | — | N | 0.12 | 0.51 | 0.09 | 2101 |
| 340 | | | | | | | | | | | | | | | | | | |
| Phage- | I | I | — | — | — | D | G | Y | — | D | F | T | — | D | 0.12 | 0.51 | 0.09 | 2102 |
| 341 | | | | | | | | | | | | | | | | | | |
| Phage- | I | F | — | — | — | — | L | — | — | — | I | I | — | Y | 0.11 | 0.51 | 0.08 | 2103 |
| 342 | | | | | | | | | | | | | | | | | | |
| Phage- | — | D | — | — | — | — | — | — | — | — | Y | D | — | Y | 0.18 | 0.51 | 0.18 | 2104 |
| 343 | | | | | | | | | | | | | | | | | | |
| Phage- | L | S | — | — | — | — | M | — | — | — | L | Y | — | D | 0.12 | 0.51 | 0.08 | 2105 |
| 344 | | | | | | | | | | | | | | | | | | |
| Phage- | Y | D | — | W | — | D | W | E | Y | N | I | D | — | T | 0.08 | 0.51 | 0.09 | 2106 |
| 345 | | | | | | | | | | | | | | | | | | |
| Phage- | N | H | — | — | — | D | G | — | — | T | I | V | — | F | 0.09 | 0.51 | 0.08 | 2107 |
| 346 | | | | | | | | | | | | | | | | | | |
| Phage- | N | F | — | — | — | — | L | — | — | — | I | P | — | H | 0.11 | 0.50 | 0.12 | 2108 |
| 347 | | | | | | | | | | | | | | | | | | |
| Phage- | F | H | — | — | — | — | I | E | — | Y | A | L | — | D | 0.08 | 0.50 | 0.09 | 2109 |
| 348 | | | | | | | | | | | | | | | | | | |
| Phage- | — | — | — | — | — | — | V | E | D | Y | N | L | — | Y | 0.07 | 0.50 | 0.08 | 2110 |
| 349 | | | | | | | | | | | | | | | | | | |
| Phage- | — | — | — | — | — | D | G | — | — | L | A | N | — | Y | 0.09 | 0.50 | 0.08 | 2111 |
| 350 | | | | | | | | | | | | | | | | | | |
| Phage- | L | I | — | — | — | V | I | A | — | D | L | P | — | N | 0.17 | 0.50 | 0.26 | 2112 |
| 351 | | | | | | | | | | | | | | | | | | |
| Phage- | D | I | — | — | — | — | I | P | — | D | — | S | — | D | 0.10 | 0.50 | 0.08 | 2113 |
| 352 | | | | | | | | | | | | | | | | | | |
| Phage- | I | — | — | — | — | — | W | E | — | A | D | Y | — | D | 0.11 | 0.50 | 0.45 | 2114 |
| 353 | | | | | | | | | | | | | | | | | | |
| Phage- | I | D | — | W | — | D | W | E | D | D | S | I | — | Y | 0.10 | 0.50 | 0.10 | 2115 |
| 354 | | | | | | | | | | | | | | | | | | |
| Phage- | — | L | — | — | — | — | V | E | D | F | T | L | — | D | 0.09 | 0.50 | 0.11 | 2116 |
| 355 | | | | | | | | | | | | | | | | | | |
| Phage- | L | — | — | — | — | V | I | E | — | I | Y | Y | — | Y | 0.09 | 0.49 | 0.09 | 2117 |
| 356 | | | | | | | | | | | | | | | | | | |
| Phage- | F | F | — | — | — | — | — | E | V | H | S | D | — | N | 0.14 | 0.49 | 0.38 | 2118 |
| 357 | | | | | | | | | | | | | | | | | | |
| Phage- | N | D | — | — | — | — | V | E | L | V | S | D | — | N | 0.10 | 0.49 | 0.08 | 2119 |
| 358 | | | | | | | | | | | | | | | | | | |
| Phage- | D | L | — | — | — | — | L | — | — | — | T | V | — | D | 0.09 | 0.49 | 0.08 | 2120 |
| 359 | | | | | | | | | | | | | | | | | | |
| Phage- | I | P | — | — | — | — | V | E | D | Y | N | L | — | N | 0.08 | 0.49 | 0.08 | 2121 |
| 360 | | | | | | | | | | | | | | | | | | |
| Phage- | Y | — | — | — | — | — | L | E | W | P | — | V | — | N | 0.10 | 0.49 | 0.10 | 2122 |
| 361 | | | | | | | | | | | | | | | | | | |
| Phage- | Y | D | — | — | — | — | L | — | — | — | — | I | — | N | 0.08 | 0.49 | 0.10 | 2123 |
| 362 | | | | | | | | | | | | | | | | | | |
| Phage- | — | — | — | — | — | D | G | — | — | — | F | D | — | A | 0.08 | 0.49 | 0.08 | 2124 |
| 363 | | | | | | | | | | | | | | | | | | |
| Phage- | N | D | — | — | — | — | W | E | D | T | Y | F | — | L | 0.08 | 0.49 | 0.10 | 2125 |
| 364 | | | | | | | | | | | | | | | | | | |
| Phage- | P | — | — | — | — | — | M | E | — | L | S | N | — | S | 0.13 | 0.48 | 0.16 | 2126 |
| 365 | | | | | | | | | | | | | | | | | | |
| Phage- | D | D | — | — | — | — | — | E | V | I | S | D | — | Y | 0.15 | 0.48 | 0.10 | 2127 |
| 366 | | | | | | | | | | | | | | | | | | |
| Phage- | D | L | — | — | — | — | — | P | — | D | — | P | — | D | 0.08 | 0.48 | 0.08 | 2128 |
| 367 | | | | | | | | | | | | | | | | | | |
| Phage- | I | — | — | — | — | — | — | — | — | — | F | V | — | Y | 0.11 | 0.48 | 0.10 | 2129 |
| 368 | | | | | | | | | | | | | | | | | | |
| Phage- | A | — | — | — | — | — | Y | E | V | F | A | D | — | N | 0.10 | 0.48 | 0.11 | 2130 |
| 369 | | | | | | | | | | | | | | | | | | |
| Phage- | I | D | — | — | — | — | Y | — | — | — | — | D | — | L | 0.09 | 0.48 | 0.09 | 2131 |
| 370 | | | | | | | | | | | | | | | | | | |
| Phage- | H | I | — | W | — | D | W | E | — | F | H | D | — | N | 0.07 | 0.48 | 0.08 | 2132 |
| 371 | | | | | | | | | | | | | | | | | | |
| Phage- | Y | D | — | — | — | — | L | — | — | T | I | T | — | L | 0.08 | 0.48 | 0.08 | 2133 |
| 372 | | | | | | | | | | | | | | | | | | |
| Phage- | Y | L | — | — | — | — | L | — | — | T | I | L | — | N | 0.09 | 0.48 | 0.08 | 2134 |
| 373 | | | | | | | | | | | | | | | | | | |
| Phage- | F | F | — | — | — | — | — | E | — | A | F | L | — | F | 0.10 | 0.48 | 0.14 | 2135 |
| 374 | | | | | | | | | | | | | | | | | | |
| Phage- | I | L | — | — | — | — | L | — | — | — | F | T | — | A | 0.07 | 0.47 | 0.08 | 2136 |
| 375 | | | | | | | | | | | | | | | | | | |
| Phage- | F | H | — | — | — | — | V | E | L | Y | T | D | — | N | 0.09 | 0.47 | 0.08 | 2137 |
| 376 | | | | | | | | | | | | | | | | | | |
| Phage- | N | L | — | — | — | — | V | E | — | Y | N | F | — | Y | 0.08 | 0.47 | 0.08 | 2138 |
| 377 | | | | | | | | | | | | | | | | | | |
| Phage- | F | D | — | — | — | — | V | E | — | T | Y | Y | — | F | 0.21 | 0.47 | 0.09 | 2139 |
| 378 | | | | | | | | | | | | | | | | | | |
| Phage- | — | F | — | — | — | — | — | E | — | D | H | Y | — | Y | 0.12 | 0.47 | 0.37 | 2140 |
| 379 | | | | | | | | | | | | | | | | | | |
| Phage- | A | I | — | — | — | — | W | E | V | V | A | D | — | N | 0.11 | 0.47 | 0.11 | 2141 |
| 380 | | | | | | | | | | | | | | | | | | |
| Phage- | F | I | — | W | — | D | W | E | — | D | N | Y | — | N | 0.12 | 0.47 | 0.25 | 2142 |
| 381 | | | | | | | | | | | | | | | | | | |
| Phage- | I | — | — | — | — | — | — | — | — | — | F | I | — | D | 0.08 | 0.47 | 0.10 | 2143 |
| 382 | | | | | | | | | | | | | | | | | | |
| Phage- | N | L | — | — | — | — | V | E | D | V | Y | D | — | H | 0.12 | 0.47 | 0.43 | 2144 |
| 383 | | | | | | | | | | | | | | | | | | |
| Phage- | H | — | — | — | — | — | V | E | — | Y | H | N | — | N | 0.09 | 0.47 | 0.09 | 2145 |
| 384 | | | | | | | | | | | | | | | | | | |
| Phage- | D | I | — | — | — | — | Y | — | — | — | Y | S | — | T | 0.09 | 0.47 | 0.09 | 2146 |
| 385 | | | | | | | | | | | | | | | | | | |
| Phage- | D | — | — | — | — | — | L | — | — | T | L | I | — | A | 0.13 | 0.46 | 0.10 | 2147 |
| 386 | | | | | | | | | | | | | | | | | | |
| Phage- | I | A | — | — | — | — | M | P | — | D | I | D | — | Y | 0.12 | 0.46 | 0.09 | 2148 |
| 387 | | | | | | | | | | | | | | | | | | |
| Phage- | I | D | — | — | — | — | L | — | — | — | I | F | — | D | 0.10 | 0.46 | 0.10 | 2149 |
| 388 | | | | | | | | | | | | | | | | | | |
| Phage- | Y | F | — | — | — | D | V | E | — | D | F | A | — | D | 0.11 | 0.46 | 0.11 | 2150 |
| 389 | | | | | | | | | | | | | | | | | | |
| Phage- | Y | N | — | — | — | — | W | E | Y | A | I | L | — | D | 0.12 | 0.46 | 0.34 | 2151 |
| 390 | | | | | | | | | | | | | | | | | | |
| Phage- | I | — | — | — | — | — | V | E | D | Y | I | V | — | N | 0.14 | 0.46 | 0.22 | 2152 |
| 391 | | | | | | | | | | | | | | | | | | |
| Phage- | Y | D | — | — | — | — | I | — | — | — | T | P | — | A | 0.07 | 0.46 | 0.07 | 2153 |
| 392 | | | | | | | | | | | | | | | | | | |
| Phage- | D | T | — | W | — | D | W | E | H | I | Y | A | — | D | 0.09 | 0.46 | 0.09 | 2154 |
| 393 | | | | | | | | | | | | | | | | | | |
| Phage- | D | I | — | — | — | — | M | — | — | — | — | T | — | N | 0.13 | 0.45 | 0.12 | 2155 |
| 394 | | | | | | | | | | | | | | | | | | |
| Phage- | Y | D | — | W | — | D | W | E | R | Y | F | P | — | I | 0.10 | 0.45 | 0.09 | 2156 |
| 395 | | | | | | | | | | | | | | | | | | |
| Phage- | H | L | — | — | — | — | L | — | — | — | — | A | — | S | 0.13 | 0.45 | 0.11 | 2157 |
| 396 | | | | | | | | | | | | | | | | | | |
| Phage- | Y | D | — | — | — | D | G | — | — | T | T | I | — | A | 0.09 | 0.45 | 0.09 | 2158 |
| 397 | | | | | | | | | | | | | | | | | | |
| Phage- | Y | — | — | — | — | — | Y | E | D | V | L | D | — | F | 0.07 | 0.45 | 0.08 | 2159 |
| 398 | | | | | | | | | | | | | | | | | | |
| Phage- | D | F | — | — | — | — | M | — | — | T | I | S | — | D | 0.14 | 0.45 | 0.10 | 2160 |
| 399 | | | | | | | | | | | | | | | | | | |
| Phage- | I | L | — | — | — | — | L | — | I | — | L | V | — | D | 0.08 | 0.44 | 0.07 | 2161 |
| 400 | | | | | | | | | | | | | | | | | | |
| Phage- | L | I | — | — | — | — | W | E | V | I | T | N | — | D | 0.12 | 0.44 | 0.40 | 2162 |
| 401 | | | | | | | | | | | | | | | | | | |
| Phage- | Y | D | — | — | — | — | — | — | — | Y | F | — | — | P | 0.09 | 0.44 | 0.09 | 2163 |
| 402 | | | | | | | | | | | | | | | | | | |
| Phage- | A | L | — | — | — | — | V | E | V | Y | D | V | — | V | 0.08 | 0.44 | 0.08 | 2164 |
| 403 | | | | | | | | | | | | | | | | | | |
| Phage- | Y | H | — | W | — | D | W | E | D | V | N | F | — | Y | 0.10 | 0.44 | 0.09 | 2165 |
| 404 | | | | | | | | | | | | | | | | | | |
| Phage- | F | L | I | — | — | M | G | G | L | T | F | Y | — | Y | 0.09 | 0.44 | 0.08 | 2166 |
| 405 | | | | | | | | | | | | | | | | | | |
| Phage- | I | I | — | — | — | — | — | — | — | Y | — | — | — | F | 0.09 | 0.43 | 0.19 | 2167 |
| 406 | | | | | | | | | | | | | | | | | | |
| Phage- | F | F | — | — | — | — | M | — | — | — | — | H | — | F | 0.11 | 0.43 | 0.09 | 2168 |
| 407 | | | | | | | | | | | | | | | | | | |
| Phage- | A | F | — | — | — | — | — | — | — | — | L | F | — | A | 0.09 | 0.43 | 0.09 | 2169 |
| 408 | | | | | | | | | | | | | | | | | | |
| Phage- | N | — | — | — | — | D | G | — | — | T | N | I | — | D | 0.08 | 0.43 | 0.08 | 2170 |
| 409 | | | | | | | | | | | | | | | | | | |
| Phage- | Y | L | — | — | — | — | W | E | W | V | H | N | — | L | 0.13 | 0.43 | 0.09 | 2171 |
| 410 | | | | | | | | | | | | | | | | | | |
| Phage- | A | T | — | — | — | D | G | — | — | — | H | I | — | A | 0.08 | 0.43 | 0.09 | 2172 |
| 411 | | | | | | | | | | | | | | | | | | |
| Phage- | — | — | — | — | — | — | V | E | V | L | D | Y | — | D | 0.07 | 0.42 | 0.08 | 2173 |
| 412 | | | | | | | | | | | | | | | | | | |
| Phage- | I | H | — | — | — | — | W | E | F | Y | T | D | — | D | 0.08 | 0.42 | 0.08 | 2174 |
| 413 | | | | | | | | | | | | | | | | | | |
| Phage- | D | D | — | — | — | — | L | — | — | T | — | A | — | D | 0.13 | 0.42 | 0.32 | 2175 |
| 414 | | | | | | | | | | | | | | | | | | |
| Phage- | Y | L | — | — | — | — | — | — | — | — | I | D | — | N | 0.11 | 0.42 | 0.17 | 2176 |
| 415 | | | | | | | | | | | | | | | | | | |
| Phage- | L | L | — | — | — | — | V | E | D | V | F | A | — | Y | 0.09 | 0.42 | 0.09 | 2177 |
| 416 | | | | | | | | | | | | | | | | | | |
| Phage- | Y | D | — | — | — | — | L | — | — | — | L | H | — | D | 0.08 | 0.42 | 0.08 | 2178 |
| 417 | | | | | | | | | | | | | | | | | | |
| Phage- | F | D | — | — | — | — | L | — | — | T | — | N | — | Y | 0.09 | 0.41 | 0.09 | 2179 |
| 418 | | | | | | | | | | | | | | | | | | |
| Phage- | F | A | — | W | — | D | W | E | — | I | N | D | — | H | 0.08 | 0.41 | 0.09 | 2180 |
| 419 | | | | | | | | | | | | | | | | | | |
| Phage- | Y | — | — | — | — | — | Y | E | — | D | I | Y | — | N | 0.09 | 0.41 | 0.09 | 2181 |
| 420 | | | | | | | | | | | | | | | | | | |
| Phage- | N | V | — | — | — | — | V | E | D | Y | T | F | — | Y | 0.09 | 0.40 | 0.08 | 2182 |
| 421 | | | | | | | | | | | | | | | | | | |
| Phage- | A | — | — | — | — | — | L | E | — | Y | D | F | — | T | 0.12 | 0.40 | 0.08 | 2183 |
| 422 | | | | | | | | | | | | | | | | | | |
| Phage- | F | D | — | — | — | — | I | — | — | — | T | I | — | T | 0.08 | 0.40 | 0.09 | 2184 |
| 423 | | | | | | | | | | | | | | | | | | |
| Phage- | N | L | — | — | — | — | L | — | — | T | L | V | — | A | 0.10 | 0.40 | 0.09 | 2185 |
| 424 | | | | | | | | | | | | | | | | | | |
| Phage- | Y | S | — | W | — | D | W | E | — | Y | L | A | — | N | 0.08 | 0.40 | 0.08 | 2186 |
| 425 | | | | | | | | | | | | | | | | | | |
| Phage- | G | I | — | — | — | — | V | E | D | Y | N | Y | — | D | 0.09 | 0.40 | 0.10 | 2187 |
| 426 | | | | | | | | | | | | | | | | | | |
| Phage- | F | F | — | — | — | — | L | — | — | — | — | N | — | H | 0.07 | 0.40 | 0.07 | 2188 |
| 427 | | | | | | | | | | | | | | | | | | |
| Phage- | Y | — | — | — | — | — | Y | E | — | D | F | Y | — | F | 0.11 | 0.40 | 0.09 | 2189 |
| 428 | | | | | | | | | | | | | | | | | | |
| Phage- | L | — | — | — | — | — | Y | — | — | — | T | D | — | Y | 0.11 | 0.40 | 0.10 | 2190 |
| 429 | | | | | | | | | | | | | | | | | | |
| Phage- | D | — | — | — | — | — | V | E | — | D | F | L | — | Y | 0.10 | 0.40 | 0.08 | 2191 |
| 430 | | | | | | | | | | | | | | | | | | |
| Phage- | T | L | — | — | — | — | V | E | L | Y | I | F | — | D | 0.08 | 0.40 | 0.09 | 2192 |
| 431 | | | | | | | | | | | | | | | | | | |
| Phage- | F | — | — | — | — | — | — | E | Q | I | A | D | — | Y | 0.11 | 0.40 | 0.09 | 2193 |
| 432 | | | | | | | | | | | | | | | | | | |
| Phage- | D | D | — | — | — | — | V | E | — | Y | H | L | — | D | 0.11 | 0.40 | 0.18 | 2194 |
| 433 | | | | | | | | | | | | | | | | | | |
| Phage- | D | — | — | — | — | — | L | E | D | V | T | L | — | H | 0.13 | 0.39 | 0.09 | 2195 |
| 434 | | | | | | | | | | | | | | | | | | |
| Phage- | — | L | — | — | — | — | V | E | D | V | N | L | — | Y | 0.09 | 0.39 | 0.08 | 2196 |
| 435 | | | | | | | | | | | | | | | | | | |
| Phage- | D | I | — | — | — | — | L | — | — | T | I | D | — | Y | 0.09 | 0.39 | 0.09 | 2197 |
| 436 | | | | | | | | | | | | | | | | | | |
| Phage- | T | — | — | — | — | — | V | E | — | D | I | N | — | Y | 0.08 | 0.39 | 0.08 | 2198 |
| 437 | | | | | | | | | | | | | | | | | | |
| Phage- | I | V | — | W | — | D | W | E | — | Y | P | N | — | D | 0.08 | 0.39 | 0.08 | 2199 |
| 438 | | | | | | | | | | | | | | | | | | |
| Phage- | S | D | — | — | — | — | L | — | — | — | I | I | — | T | 0.11 | 0.39 | 0.10 | 2200 |
| 439 | | | | | | | | | | | | | | | | | | |
| Phage- | Y | D | — | — | — | — | L | P | — | D | Y | D | — | N | 0.15 | 0.39 | 0.10 | 2201 |
| 440 | | | | | | | | | | | | | | | | | | |
| Phage- | N | L | — | W | — | D | W | E | — | Y | Y | A | — | D | 0.12 | 0.39 | 0.17 | 2202 |
| 441 | | | | | | | | | | | | | | | | | | |
| Phage- | D | D | — | — | — | — | L | — | — | I | L | P | — | H | 0.10 | 0.39 | 0.08 | 2203 |
| 442 | | | | | | | | | | | | | | | | | | |
| Phage- | S | L | — | — | — | D | G | Q | — | D | Y | T | — | F | 0.08 | 0.39 | 0.08 | 2204 |
| 443 | | | | | | | | | | | | | | | | | | |
| Phage- | L | I | — | W | — | D | W | E | — | Y | N | F | — | T | 0.13 | 0.39 | 0.11 | 2205 |
| 444 | | | | | | | | | | | | | | | | | | |
| Phage- | F | H | — | — | — | D | G | — | — | T | — | P | — | I | 0.08 | 0.39 | 0.08 | 2206 |
| 445 | | | | | | | | | | | | | | | | | | |
| Phage- | F | D | — | — | — | — | W | E | W | I | Y | D | — | F | 0.08 | 0.38 | 0.08 | 2207 |
| 446 | | | | | | | | | | | | | | | | | | |
| Phage- | I | — | — | — | — | — | W | — | — | — | L | D | — | D | 0.08 | 0.38 | 0.09 | 2208 |
| 447 | | | | | | | | | | | | | | | | | | |
| Phage- | L | I | — | — | — | — | I | — | — | — | A | S | — | N | 0.10 | 0.38 | 0.11 | 2209 |
| 448 | | | | | | | | | | | | | | | | | | |
| Phage- | T | S | — | W | V | D | W | E | — | F | S | D | — | I | 0.11 | 0.38 | 0.34 | 2210 |
| 449 | | | | | | | | | | | | | | | | | | |
| Phage- | Y | — | — | — | — | — | V | E | — | D | Y | V | — | D | 0.10 | 0.38 | 0.08 | 2211 |
| 450 | | | | | | | | | | | | | | | | | | |
| Phage- | D | D | — | — | — | — | Q | E | F | I | Y | A | — | I | 0.09 | 0.38 | 0.08 | 2212 |
| 451 | | | | | | | | | | | | | | | | | | |
| Phage- | A | D | — | W | — | D | W | E | — | Y | A | D | — | Y | 0.11 | 0.38 | 0.10 | 2213 |
| 452 | | | | | | | | | | | | | | | | | | |
| Phage- | Y | — | — | — | — | — | — | — | — | — | I | H | — | I | 0.08 | 0.38 | 0.07 | 2214 |
| 453 | | | | | | | | | | | | | | | | | | |
| Phage- | S | E | — | W | — | D | W | E | P | F | F | D | — | N | 0.08 | 0.37 | 0.09 | 2215 |
| 454 | | | | | | | | | | | | | | | | | | |
| Phage- | Y | H | — | — | — | — | M | — | — | — | L | I | — | T | 0.07 | 0.37 | 0.07 | 2216 |
| 455 | | | | | | | | | | | | | | | | | | |
| Phage- | S | D | — | W | — | D | W | E | D | A | Y | F | — | I | 0.09 | 0.37 | 0.07 | 2217 |
| 456 | | | | | | | | | | | | | | | | | | |
| Phage- | — | D | — | — | — | — | V | E | — | Y | Y | H | — | D | 0.08 | 0.37 | 0.08 | 2218 |
| 457 | | | | | | | | | | | | | | | | | | |
| Phage- | D | N | — | — | — | — | Y | — | — | — | I | A | — | N | 0.10 | 0.37 | 0.10 | 2219 |
| 458 | | | | | | | | | | | | | | | | | | |
| Phage- | L | — | — | — | — | V | — | E | F | Y | D | Y | — | Y | 0.08 | 0.37 | 0.10 | 2220 |
| 459 | | | | | | | | | | | | | | | | | | |
| Phage- | Y | T | — | — | — | — | M | — | — | — | — | T | — | I | 0.09 | 0.37 | 0.08 | 2221 |
| 460 | | | | | | | | | | | | | | | | | | |
| Phage- | N | F | — | W | — | D | W | E | V | N | S | F | — | D | 0.09 | 0.37 | 0.08 | 2222 |
| 461 | | | | | | | | | | | | | | | | | | |
| Phage- | N | A | — | W | — | D | W | E | Y | I | D | F | — | N | 0.12 | 0.36 | 0.09 | 2223 |
| 462 | | | | | | | | | | | | | | | | | | |
| Phage- | Y | N | — | — | — | — | M | — | — | — | I | F | — | S | 0.09 | 0.36 | 0.07 | 2224 |
| 463 | | | | | | | | | | | | | | | | | | |
| Phage- | L | D | — | — | — | — | L | — | — | — | I | T | — | Y | 0.08 | 0.36 | 0.09 | 2225 |
| 464 | | | | | | | | | | | | | | | | | | |
| Phage- | H | — | — | — | — | — | — | — | — | — | I | N | — | D | 0.11 | 0.36 | 0.08 | 2226 |
| 465 | | | | | | | | | | | | | | | | | | |
| Phage- | I | I | — | — | — | — | L | P | — | D | Y | V | — | T | 0.08 | 0.36 | 0.08 | 2227 |
| 466 | | | | | | | | | | | | | | | | | | |
| Phage- | D | I | — | — | — | — | — | — | — | — | I | D | — | S | 0.08 | 0.36 | 0.08 | 2228 |
| 467 | | | | | | | | | | | | | | | | | | |
| Phage- | P | — | — | — | — | — | — | — | — | — | — | L | — | F | 0.10 | 0.36 | 0.09 | 2229 |
| 468 | | | | | | | | | | | | | | | | | | |
| Phage- | — | F | — | — | — | — | — | — | — | — | — | D | — | Y | 0.07 | 0.36 | 0.08 | 2230 |
| 469 | | | | | | | | | | | | | | | | | | |
| Phage- | Y | D | — | W | — | D | W | E | — | A | L | P | — | A | 0.08 | 0.36 | 0.08 | 2231 |
| 470 | | | | | | | | | | | | | | | | | | |
| Phage- | D | D | — | W | — | D | W | E | D | Y | — | F | — | F | 0.10 | 0.36 | 0.10 | 2232 |
| 471 | | | | | | | | | | | | | | | | | | |
| Phage- | H | F | — | — | — | — | W | E | L | F | S | D | — | Y | 0.11 | 0.36 | 0.11 | 2233 |
| 472 | | | | | | | | | | | | | | | | | | |
| Phage- | I | T | — | W | — | D | W | E | V | N | F | P | — | Y | 0.07 | 0.35 | 0.07 | 2234 |
| 473 | | | | | | | | | | | | | | | | | | |
| Phage- | P | D | — | — | — | — | L | — | — | — | I | T | — | N | 0.20 | 0.35 | 0.16 | 2235 |
| 474 | | | | | | | | | | | | | | | | | | |
| Phage- | N | L | — | W | — | D | W | E | A | F | F | P | — | Y | 0.08 | 0.35 | 0.07 | 2236 |
| 475 | | | | | | | | | | | | | | | | | | |
| Phage- | F | — | — | — | — | — | — | E | Y | I | R | D | — | Y | 0.08 | 0.35 | 0.07 | 2237 |
| 476 | | | | | | | | | | | | | | | | | | |
| Phage- | F | F | — | — | — | — | — | — | — | — | I | I | — | D | 0.09 | 0.35 | 0.10 | 2238 |
| 477 | | | | | | | | | | | | | | | | | | |
| Phage- | — | L | — | — | — | K | G | G | P | T | Y | N | — | S | 0.08 | 0.35 | 0.10 | 2239 |
| 478 | | | | | | | | | | | | | | | | | | |
| Phage- | L | A | — | W | — | V | W | E | — | P | G | H | — | D | 0.11 | 0.35 | 0.10 | 2240 |
| 479 | | | | | | | | | | | | | | | | | | |
| Phage- | D | — | — | — | — | — | V | E | D | V | N | D | — | Y | 0.07 | 0.35 | 0.08 | 2241 |
| 480 | | | | | | | | | | | | | | | | | | |
| Phage- | D | — | — | — | — | — | — | E | — | A | H | Y | — | N | 0.08 | 0,35 | 0.07 | 2242 |
| 481 | | | | | | | | | | | | | | | | | | |
| Phage- | — | L | — | — | — | — | L | — | — | T | L | T | — | T | 0.08 | 0.35 | 0.07 | 2243 |
| 482 | | | | | | | | | | | | | | | | | | |
| Phage- | Y | — | — | — | — | — | I | E | D | Y | N | L | — | N | 0.10 | 0.34 | 0.09 | 2244 |
| 483 | | | | | | | | | | | | | | | | | | |
| Phage- | Y | I | — | — | — | — | V | E | — | Y | Y | N | — | F | 0.13 | 0.34 | 0.14 | 2245 |
| 484 | | | | | | | | | | | | | | | | | | |
| Phage- | D | I | — | — | — | — | L | — | — | — | I | F | — | F | 0.08 | 0.34 | 0.09 | 2246 |
| 485 | | | | | | | | | | | | | | | | | | |
| Phage- | D | I | — | — | — | — | V | E | — | D | Y | L | — | Y | 0.07 | 0.34 | 0.08 | 2247 |
| 486 | | | | | | | | | | | | | | | | | | |
| Phage- | T | L | — | — | — | — | — | E | — | D | A | P | — | I | 0.10 | 0.34 | 0.08 | 2248 |
| 487 | | | | | | | | | | | | | | | | | | |
| Phage- | N | — | — | W | — | D | W | E | Y | I | N | S | — | V | 0.14 | 0.34 | 0.09 | 2249 |
| 488 | | | | | | | | | | | | | | | | | | |
| Phage- | N | D | — | — | — | — | V | E | — | Y | Y | Y | — | T | 0.07 | 0.34 | 0.09 | 2250 |
| 489 | | | | | | | | | | | | | | | | | | |
| Phage- | I | T | — | — | — | — | M | — | — | — | I | D | — | N | 0.08 | 0.34 | 0.08 | 2251 |
| 490 | | | | | | | | | | | | | | | | | | |
| Phage- | Y | — | — | — | — | — | M | A | — | D | L | I | — | D | 0.10 | 0.34 | 0.29 | 2252 |
| 491 | | | | | | | | | | | | | | | | | | |
| Phage- | I | D | — | — | — | — | L | — | — | — | I | V | — | T | 0.11 | 0,33 | 0.09 | 2253 |
| 492 | | | | | | | | | | | | | | | | | | |
| Phage- | H | T | — | W | — | D | W | E | W | D | — | Y | — | D | 0.08 | 0.33 | 0.07 | 2254 |
| 493 | | | | | | | | | | | | | | | | | | |
| Phage- | I | H | — | — | — | — | W | E | L | I | D | D | — | L | 0.08 | 0.33 | 0.10 | 2255 |
| 494 | | | | | | | | | | | | | | | | | | |
| Phage- | Y | T | — | — | — | — | L | — | — | — | I | T | — | T | 0.08 | 0.33 | 0.08 | 2256 |
| 495 | | | | | | | | | | | | | | | | | | |
| Phage- | F | H | — | — | — | — | V | E | — | T | — | Y | — | F | 0.11 | 0.33 | 0.09 | 2257 |
| 496 | | | | | | | | | | | | | | | | | | |
| Phage- | D | — | — | — | — | — | L | — | — | — | L | I | — | N | 0.07 | 0.33 | 0.08 | 2258 |
| 497 | | | | | | | | | | | | | | | | | | |
| Phage- | I | — | — | — | — | — | — | — | — | — | D | Y | — | I | 0.08 | 0.33 | 0.10 | 2259 |
| 498 | | | | | | | | | | | | | | | | | | |
| Phage- | D | L | — | — | — | — | I | E | — | D | L | V | — | T | 0.09 | 0.33 | 0.09 | 2260 |
| 499 | | | | | | | | | | | | | | | | | | |
| Phage- | N | I | — | — | — | — | L | Q | — | D | I | V | — | P | 0.09 | 0.33 | 0.09 | 2261 |
| 500 | | | | | | | | | | | | | | | | | | |
| Phage- | N | N | — | — | — | — | M | — | — | — | I | T | — | Y | 0.08 | 0.33 | 0.08 | 2262 |
| 501 | | | | | | | | | | | | | | | | | | |
| Phage- | H | T | — | — | — | — | L | — | — | — | I | V | — | V | 0.08 | 0.33 | 0.08 | 2263 |
| 502 | | | | | | | | | | | | | | | | | | |
| Phage- | Y | — | — | — | — | — | I | E | D | I | L | V | — | T | 0.12 | 0.33 | 0.23 | 2264 |
| 503 | | | | | | | | | | | | | | | | | | |
| Phage- | N | T | — | — | — | — | — | E | F | V | H | L | — | P | 0.07 | 0.33 | 0.11 | 2265 |
| 504 | | | | | | | | | | | | | | | | | | |
| Phage- | D | I | — | — | — | — | M | — | — | — | T | V | — | D | 0.10 | 0.33 | 0.09 | 2266 |
| 505 | | | | | | | | | | | | | | | | | | |
| Phage- | A | I | — | — | — | — | V | E | I | V | N | Y | — | Y | 0.09 | 0.32 | 0.07 | 2267 |
| 506 | | | | | | | | | | | | | | | | | | |
| Phage- | H | L | — | — | — | — | V | E | D | P | T | A | — | V | 0.10 | 0.32 | 0.28 | 2268 |
| 507 | | | | | | | | | | | | | | | | | | |
| Phage- | A | D | — | — | — | — | L | — | — | — | I | S | — | T | 0.10 | 0.32 | 0.09 | 2269 |
| 508 | | | | | | | | | | | | | | | | | | |
| Phage- | F | D | — | — | — | — | L | — | — | — | — | I | — | D | 0.07 | 0.32 | 0.09 | 2270 |
| 509 | | | | | | | | | | | | | | | | | | |
| Phage- | D | V | — | — | — | — | — | — | — | — | I | D | — | N | 0.10 | 0.32 | 0.08 | 2271 |
| 510 | | | | | | | | | | | | | | | | | | |
| Phage- | Y | L | — | — | — | — | V | E | — | I | S | I | — | F | 0.08 | 0.32 | 0.07 | 2272 |
| 511 | | | | | | | | | | | | | | | | | | |
| Phage- | S | A | — | — | — | — | — | — | — | — | L | H | — | V | 0.10 | 0.31 | 0.30 | 2273 |
| 512 | | | | | | | | | | | | | | | | | | |
| Phage- | H | L | — | W | — | D | W | E | — | D | S | A | — | N | 0.08 | 0.31 | 0,08 | 2274 |
| 513 | | | | | | | | | | | | | | | | | | |
| Phage- | H | T | — | W | — | D | W | E | Y | D | Y | D | — | F | 0.10 | 0.31 | 0.08 | 2275 |
| 514 | | | | | | | | | | | | | | | | | | |
| Phage- | Y | D | — | — | — | — | W | E | — | V | A | L | — | N | 0.10 | 0.31 | 0.10 | 2276 |
| 515 | | | | | | | | | | | | | | | | | | |
| Phage- | T | L | I | — | — | — | I | E | — | Y | I | V | — | Y | 0.09 | 0.31 | 0.23 | 2277 |
| 516 | | | | | | | | | | | | | | | | | | |
| Phage- | S | — | — | — | — | — | — | — | — | — | I | F | — | T | 0.09 | 0.31 | 0.09 | 2278 |
| 517 | | | | | | | | | | | | | | | | | | |
| Phage- | D | I | — | — | — | — | — | — | — | — | L | H | — | Y | 0.08 | 0.31 | 0.08 | 2279 |
| 518 | | | | | | | | | | | | | | | | | | |
| Phage- | L | F | — | — | — | — | — | E | — | A | Y | L | — | I | 0.08 | 0.31 | 0.08 | 2280 |
| 519 | | | | | | | | | | | | | | | | | | |
| Phage- | I | F | — | — | — | — | I | E | — | D | F | V | — | T | 0.10 | 0.31 | 0.10 | 2281 |
| 520 | | | | | | | | | | | | | | | | | | |
| Phage- | D | D | — | — | — | — | W | E | Y | Y | — | A | — | V | 0.08 | 0.31 | 0.08 | 2282 |
| 521 | | | | | | | | | | | | | | | | | | |
| Phage- | D | D | — | — | — | — | L | — | — | T | T | I | — | Y | 0.10 | 0.31 | 0.09 | 2283 |
| 522 | | | | | | | | | | | | | | | | | | |
| Phage- | A | S | — | — | — | — | L | — | — | — | I | A | — | D | 0.10 | 0.31 | 0.09 | 2284 |
| 523 | | | | | | | | | | | | | | | | | | |
| Phage- | Y | L | — | — | — | — | V | E | D | Y | D | Y | — | Y | 0.08 | 0.31 | 0.09 | 2285 |
| 524 | | | | | | | | | | | | | | | | | | |
| Phage- | D | L | — | — | — | — | W | E | — | T | I | F | — | A | 0.12 | 0.30 | 0.09 | 2286 |
| 525 | | | | | | | | | | | | | | | | | | |
| Phage- | D | F | — | — | — | D | G | E | — | F | Y | I | — | P | 0.12 | 0.30 | 0.11 | 2287 |
| 526 | | | | | | | | | | | | | | | | | | |
| Phage- | — | — | — | — | — | — | V | E | — | N | I | L | — | H | 0.15 | 0.30 | 0.17 | 2288 |
| 527 | | | | | | | | | | | | | | | | | | |
| Phage- | D | — | — | — | — | — | V | E | — | N | Y | F | — | F | 0.12 | 0.30 | 0.21 | 2289 |
| 528 | | | | | | | | | | | | | | | | | | |
| Phage- | N | D | — | W | — | D | W | Y | — | F | L | S | — | D | 0.10 | 0.30 | 0.10 | 2290 |
| 529 | | | | | | | | | | | | | | | | | | |
| Phage- | R | D | — | W | — | D | W | E | V | P | Y | F | — | D | 0.08 | 0.30 | 0.09 | 2291 |
| 530 | | | | | | | | | | | | | | | | | | |
| Phage- | N | L | — | — | — | — | V | E | — | A | — | Y | — | Y | 0.10 | 0.30 | 0.13 | 2292 |
| 531 | | | | | | | | | | | | | | | | | | |
| Phage- | F | D | — | W | — | D | G | E | L | N | Y | L | — | T | 0.23 | 0.30 | 0.08 | 2293 |
| 532 | | | | | | | | | | | | | | | | | | |
| Phage- | Y | — | — | — | — | — | V | E | D | V | N | L | — | I | 0.18 | 0.30 | 0.10 | 2294 |
| 533 | | | | | | | | | | | | | | | | | | |
| Phage- | D | N | — | — | — | — | Y | — | — | — | I | T | — | L | 0.11 | 0.29 | 0.09 | 2295 |
| 534 | | | | | | | | | | | | | | | | | | |
| Phage- | L | N | — | W | — | D | W | E | — | D | Y | S | — | N | 0.09 | 0.29 | 0.09 | 2296 |
| 535 | | | | | | | | | | | | | | | | | | |
| Phage- | P | T | — | — | — | — | V | E | — | L | L | S | — | N | 0.12 | 0.29 | 0.26 | 2297 |
| 536 | | | | | | | | | | | | | | | | | | |
| Phage- | D | H | — | — | — | — | V | E | L | I | F | Y | — | H | 0.11 | 0.29 | 0.08 | 2298 |
| 537 | | | | | | | | | | | | | | | | | | |
| Phage- | F | H | — | — | — | — | L | — | — | — | I | F | — | Y | 0.08 | 0.29 | 0.08 | 2299 |
| 538 | | | | | | | | | | | | | | | | | | |
| Phage- | F | D | — | — | — | — | L | E | — | T | — | V | — | P | 0.16 | 0.29 | 0.16 | 2300 |
| 539 | | | | | | | | | | | | | | | | | | |
| Phage- | D | F | — | — | — | — | L | — | — | — | L | P | — | A | 0.08 | 0.29 | 0.08 | 2301 |
| 540 | | | | | | | | | | | | | | | | | | |
| Phage- | D | S | — | — | — | — | L | — | — | — | I | Y | — | D | 0.09 | 0.29 | 0.09 | 2302 |
| 541 | | | | | | | | | | | | | | | | | | |
| Phage- | A | D | — | W | — | D | W | E | — | F | L | L | — | F | 0.12 | 0.29 | 0.10 | 2303 |
| 542 | | | | | | | | | | | | | | | | | | |
| Phage- | I | L | — | — | — | — | V | E | — | L | D | F | — | N | 0.10 | 0.28 | 0.08 | 2304 |
| 543 | | | | | | | | | | | | | | | | | | |
| Phage- | F | F | — | — | — | — | — | E | — | I | F | L | — | Y | 0.09 | 0.28 | 0.07 | 2305 |
| 544 | | | | | | | | | | | | | | | | | | |
| Phage- | Y | N | — | — | — | D | G | — | — | — | Y | D | — | H | 0.07 | 0.28 | 0.07 | 2306 |
| 545 | | | | | | | | | | | | | | | | | | |
| Phage- | D | N | — | — | — | — | L | — | — | T | I | T | — | F | 0.11 | 0.28 | 0.11 | 2307 |
| 546 | | | | | | | | | | | | | | | | | | |
| Phage- | H | N | — | — | — | D | G | — | — | A | F | I | — | N | 0.09 | 0.28 | 0.23 | 2308 |
| 547 | | | | | | | | | | | | | | | | | | |
| Phage- | D | — | — | — | — | — | V | E | — | D | L | V | — | P | 0.10 | 0.28 | 0.23 | 2309 |
| 548 | | | | | | | | | | | | | | | | | | |
| Phage- | D | — | — | — | — | — | L | — | — | — | L | N | — | F | 0.08 | 0.28 | 0.07 | 2310 |
| 549 | | | | | | | | | | | | | | | | | | |
| Phage- | D | — | — | — | — | — | — | Q | — | D | F | H | — | H | 0.11 | 0.28 | 0.27 | 2311 |
| 550 | | | | | | | | | | | | | | | | | | |
| Phage- | Y | D | — | — | — | — | W | E | F | T | D | D | — | I | 0.10 | 0.28 | 0.18 | 2312 |
| 551 | | | | | | | | | | | | | | | | | | |
| Phage- | D | I | — | — | — | — | Y | E | — | D | I | I | — | Y | 0.14 | 0.28 | 0.19 | 2313 |
| 552 | | | | | | | | | | | | | | | | | | |
| Phage- | F | D | — | — | — | — | L | — | — | T | — | P | — | P | 0.11 | 0.28 | 0.08 | 2314 |
| 553 | | | | | | | | | | | | | | | | | | |
| Phage- | N | — | — | — | — | — | L | — | — | T | S | V | — | D | 0.09 | 0.28 | 0.26 | 2315 |
| 554 | | | | | | | | | | | | | | | | | | |
| Phage- | Y | — | — | — | — | — | W | E | F | — | F | D | — | D | 0.17 | 0.28 | 0.11 | 2316 |
| 555 | | | | | | | | | | | | | | | | | | |
| Phage- | Y | A | — | — | — | — | L | — | — | — | — | T | — | D | 0.09 | 0.28 | 0.08 | 2317 |
| 556 | | | | | | | | | | | | | | | | | | |
| Phage- | F | L | — | — | — | — | V | E | Q | D | Y | F | — | V | 0.08 | 0.28 | 0.10 | 2318 |
| 557 | | | | | | | | | | | | | | | | | | |
| Phage- | D | N | — | — | — | — | — | — | — | — | — | R | — | D | 0.09 | 0.27 | 0.26 | 2319 |
| 558 | | | | | | | | | | | | | | | | | | |
| Phage- | N | D | — | — | — | D | G | I | — | T | — | D | — | Y | 0.10 | 0.27 | 0.24 | 2320 |
| 559 | | | | | | | | | | | | | | | | | | |
| Phage- | Y | F | — | — | — | — | V | E | D | Y | N | D | — | F | 0.08 | 0.27 | 0.09 | 2321 |
| 560 | | | | | | | | | | | | | | | | | | |
| Phage- | N | L | — | — | — | — | — | — | — | — | I | F | — | Y | 0.10 | 0.27 | 0.07 | 2322 |
| 561 | | | | | | | | | | | | | | | | | | |
| Phage- | I | D | — | W | — | D | W | E | — | Y | I | P | — | T | 0.10 | 0.27 | 0.08 | 2323 |
| 562 | | | | | | | | | | | | | | | | | | |
| Phage- | I | — | — | — | — | D | G | — | — | — | F | I | — | A | 0.07 | 0.27 | 0.08 | 2324 |
| 563 | | | | | | | | | | | | | | | | | | |
| Phage- | D | — | — | — | — | — | — | — | — | — | — | V | — | Y | 0.08 | 0.27 | 0.07 | 2325 |
| 564 | | | | | | | | | | | | | | | | | | |
| Phage- | — | F | — | — | — | — | W | E | D | I | T | D | — | D | 0.13 | 0.27 | 0.09 | 2326 |
| 565 | | | | | | | | | | | | | | | | | | |
| Phage- | L | D | — | — | — | — | V | — | — | T | F | T | — | H | 0.08 | 0.26 | 0.08 | 2327 |
| 566 | | | | | | | | | | | | | | | | | | |
| Phage- | D | D | — | — | — | — | Y | — | — | — | F | A | — | H | 0.13 | 0.26 | 0.10 | 2328 |
| 567 | | | | | | | | | | | | | | | | | | |
| Phage- | I | — | — | — | — | — | Y | Q | — | D | L | P | — | N | 0.12 | 0.26 | 0.11 | 2329 |
| 568 | | | | | | | | | | | | | | | | | | |
| Phage- | L | D | — | — | — | — | V | E | — | Y | N | Y | — | V | 0.09 | 0.26 | 0.08 | 2330 |
| 569 | | | | | | | | | | | | | | | | | | |
| Phage- | Y | V | — | — | — | — | — | — | — | — | S | A | — | N | 0.14 | 0.26 | 0.08 | 2331 |
| 570 | | | | | | | | | | | | | | | | | | |
| Phage- | T | P | — | — | — | — | L | E | — | A | I | — | — | Y | 0.10 | 0.26 | 0.10 | 2332 |
| 571 | | | | | | | | | | | | | | | | | | |
| Phage- | Y | F | — | — | — | — | — | — | — | — | A | D | — | N | 0.08 | 0.26 | 0.08 | 2333 |
| 572 | | | | | | | | | | | | | | | | | | |
| Phage- | D | D | — | — | — | — | — | E | — | D | I | I | — | D | 0.12 | 0.26 | 0.25 | 2334 |
| 573 | | | | | | | | | | | | | | | | | | |
| Phage- | L | — | — | — | — | V | V | E | — | L | N | H | — | N | 0.08 | 0.26 | 0.09 | 2335 |
| 574 | | | | | | | | | | | | | | | | | | |
| Phage- | — | I | — | — | — | D | G | E | — | L | I | A | — | A | 0.09 | 0.26 | 0.27 | 2336 |
| 575 | | | | | | | | | | | | | | | | | | |
| Phage- | F | A | — | W | — | D | W | Q | — | T | Y | V | — | N | 0.09 | 0.25 | 0.08 | 2337 |
| 576 | | | | | | | | | | | | | | | | | | |
| Phage- | Y | I | — | — | — | — | V | E | F | L | F | F | — | N | 0.08 | 0.25 | 0.08 | 2338 |
| 577 | | | | | | | | | | | | | | | | | | |
| Phage- | T | Q | — | — | — | K | G | E | P | T | Y | H | — | Y | 0.12 | 0.25 | 0.12 | 2339 |
| 578 | | | | | | | | | | | | | | | | | | |
| Phage- | N | — | — | — | — | — | V | E | — | Y | H | N | — | D | 0.10 | 0.25 | 0.17 | 2340 |
| 579 | | | | | | | | | | | | | | | | | | |
| Phage- | — | — | — | — | — | — | W | E | F | F | S | D | — | A | 0.08 | 0.25 | 0.07 | 2341 |
| 580 | | | | | | | | | | | | | | | | | | |
| Phage- | F | — | — | — | — | — | L | E | — | — | F | F | — | Y | 0.10 | 0.25 | 0.22 | 2342 |
| 581 | | | | | | | | | | | | | | | | | | |
| Phage- | D | — | — | — | = | — | I | E | — | N | F | Y | — | Y | 0.13 | 0.25 | 0.09 | 2343 |
| 582 | | | | | | | | | | | | | | | | | | |
| Phage- | Y | A | — | — | — | — | V | E | — | Y | — | Y | — | A | 0.08 | 0.25 | 0.09 | 2344 |
| 583 | | | | | | | | | | | | | | | | | | |
| Phage- | — | D | — | — | — | — | L | — | — | — | I | I | — | D | 0.08 | 0.25 | 0.07 | 2345 |
| 584 | | | | | | | | | | | | | | | | | | |
| Phage- | N | D | — | — | — | — | M | — | — | — | I | A | — | Y | 0.07 | 0.25 | 0.07 | 2346 |
| 585 | | | | | | | | | | | | | | | | | | |
| Phage- | — | — | — | — | — | — | — | — | — | Y | L | A | — | A | 0.09 | 0.25 | 0.21 | 2347 |
| 586 | | | | | | | | | | | | | | | | | | |
| Phage- | — | I | — | — | — | | — | — | — | — | A | N | — | D | 0.08 | 0.25 | 0.09 | 2348 |
| 587 | | | | | | | | | | | | | | | | | | |
| Phage- | L | T | — | W | — | D | W | E | — | D | F | F | — | N | 0.07 | 0.24 | 0.07 | 2349 |
| 588 | | | | | | | | | | | | | | | | | | |
| Phage- | F | — | — | — | — | — | Q | E | — | I | N | Y | — | Y | 0.10 | 0.24 | 0.23 | 2350 |
| 589 | | | | | | | | | | | | | | | | | | |
| Phage- | T | — | — | — | — | — | L | E | — | F | F | L | — | Y | 0.13 | 0.24 | 0.08 | 2351 |
| 590 | | | | | | | | | | | | | | | | | | |
| Phage- | P | D | — | — | — | — | L | — | — | — | — | A | — | H | 0.12 | 0.24 | 0.09 | 2352 |
| 591 | | | | | | | | | | | | | | | | | | |
| Phage- | N | D | — | — | — | — | — | E | — | I | I | F | — | V | 0.09 | 0.24 | 0.24 | 2353 |
| 592 | | | | | | | | | | | | | | | | | | |
| Phage- | Y | I | — | — | — | — | — | — | — | — | F | Y | — | N | 0.25 | 0.24 | 0.08 | 2354 |
| 593 | | | | | | | | | | | | | | | | | | |
| Phage- | H | A | — | — | — | — | L | — | — | — | L | L | — | N | 0.20 | 0.24 | 0.07 | 2355 |
| 594 | | | | | | | | | | | | | | | | | | |
| Phage- | Y | — | — | — | — | — | W | E | — | A | — | L | — | A | 0.09 | 0.24 | 0.21 | 2356 |
| 595 | | | | | | | | | | | | | | | | | | |
| Phage- | A | F | — | — | — | — | V | E | — | Y | D | L | — | N | 0.10 | 0.24 | 0.16 | 2357 |
| 596 | | | | | | | | | | | | | | | | | | |
| Phage- | Y | N | — | — | — | — | — | — | — | — | — | A | — | S | 0.15 | 0.23 | 0.09 | 2358 |
| 597 | | | | | | | | | | | | | | | | | | |
| Phage- | Y | L | — | — | — | — | V | E | D | D | T | L | — | A | 0.08 | 0.23 | 0.09 | 2359 |
| 598 | | | | | | | | | | | | | | | | | | |
| Phage- | A | V | — | — | — | — | — | — | — | — | — | N | — | D | 0.08 | 0.23 | 0.08 | 2360 |
| 599 | | | | | | | | | | | | | | | | | | |
| Phage- | N | — | — | — | — | — | W | E | V | Y | S | L | — | P | 0.13 | 0.23 | 0.08 | 2361 |
| 600 | | | | | | | | | | | | | | | | | | |
| Phage- | D | F | — | — | — | — | V | E | — | D | T | Y | — | H | 0.07 | 0.23 | 0.07 | 2362 |
| 601 | | | | | | | | | | | | | | | | | | |
| Phage- | I | S | — | — | — | — | Y | E | W | D | Y | A | — | N | 0.08 | 0.23 | 0.10 | 2363 |
| 602 | | | | | | | | | | | | | | | | | | |
| Phage- | — | N | — | — | — | — | L | — | — | — | I | I | — | Y | 0.08 | 0.23 | 0.08 | 2364 |
| 603 | | | | | | | | | | | | | | | | | | |
| Phage- | Y | D | — | — | — | — | — | — | — | T | A | P | — | Y | 0.07 | 0.23 | 0.08 | 2365 |
| 604 | | | | | | | | | | | | | | | | | | |
| Phage- | Y | L | — | — | — | — | — | E | — | N | F | L | — | T | 0.09 | 0.23 | 0.22 | 2366 |
| 605 | | | | | | | | | | | | | | | | | | |
| Phage- | F | D | — | — | — | — | V | — | — | — | — | D | — | A | 0.08 | 0.22 | 0.09 | 2367 |
| 606 | | | | | | | | | | | | | | | | | | |
| Phage- | Y | D | — | — | — | — | Q | E | — | I | S | F | — | N | 0.09 | 0.22 | 0.09 | 2368 |
| 607 | | | | | | | | | | | | | | | | | | |
| Phage- | I | D | — | — | — | — | I | E | L | Y | D | D | — | F | 0.09 | 0.22 | 0.09 | 2369 |
| 608 | | | | | | | | | | | | | | | | | | |
| Phage- | T | F | — | — | — | — | L | — | — | — | — | Y | — | Y | 0.08 | 0.22 | 0.07 | 2370 |
| 609 | | | | | | | | | | | | | | | | | | |
| Phage- | F | F | — | — | — | — | I | — | — | — | N | A | — | V | 0.09 | 0.22 | 0.07 | 2371 |
| 610 | | | | | | | | | | | | | | | | | | |
| Phage- | Y | H | — | W | — | D | W | E | P | I | Y | I | — | I | 0.12 | 0.22 | 0.10 | 2372 |
| 611 | | | | | | | | | | | | | | | | | | |
| Phage- | A | I | — | — | — | — | Y | E | — | D | H | Y | — | Y | 0.08 | 0.22 | 0.08 | 2373 |
| 612 | | | | | | | | | | | | | | | | | | |
| Phage- | P | L | — | — | — | D | G | F | — | N | Y | N | — | F | 0.12 | 0.22 | 0.08 | 2374 |
| 613 | | | | | | | | | | | | | | | | | | |
| Phage- | F | P | — | W | — | D | W | E | W | D | N | N | — | H | 0.09 | 0.22 | 0.09 | 2375 |
| 614 | | | | | | | | | | | | | | | | | | |
| Phage- | — | D | — | — | — | D | G | — | — | L | A | A | — | H | 0.10 | 0.22 | 0.11 | 2376 |
| 615 | | | | | | | | | | | | | | | | | | |
| Phage- | — | D | — | W | — | D | W | E | — | Y | Y | S | — | D | 0.08 | 0.22 | 0.07 | 2377 |
| 616 | | | | | | | | | | | | | | | | | | |
| Phage- | — | — | — | — | — | — | Y | — | — | — | Y | D | — | T | 0.07 | 0.21 | 0.10 | 2378 |
| 617 | | | | | | | | | | | | | | | | | | |
| Phage- | N | L | — | — | — | — | W | E | N | F | A | D | — | F | 0.08 | 0.21 | 0.08 | 2379 |
| 618 | | | | | | | | | | | | | | | | | | |
| Phage- | Y | L | — | — | — | — | L | E | V | F | F | V | — | D | 0.12 | 0.21 | 0.10 | 2380 |
| 619 | | | | | | | | | | | | | | | | | | |
| Phage- | I | F | — | — | — | — | L | E | D | Y | S | I | — | F | 0.09 | 0.21 | 0.08 | 2381 |
| 620 | | | | | | | | | | | | | | | | | | |
| Phage- | D | — | — | — | — | — | L | E | Q | Y | D | L | — | F | 0.09 | 0.21 | 0.08 | 2382 |
| 621 | | | | | | | | | | | | | | | | | | |
| Phage- | L | L | — | — | — | V | N | E | D | P | L | D | — | Y | 0.11 | 0.21 | 0.13 | 2383 |
| 622 | | | | | | | | | | | | | | | | | | |
| Phage- | I | D | — | — | — | — | — | — | — | — | — | F | — | Y | 0.08 | 0.21 | 0.08 | 2384 |
| 623 | | | | | | | | | | | | | | | | | | |
| Phage- | I | I | — | — | — | — | V | E | — | I | D | I | — | S | 0.08 | 0.21 | 0.08 | 2385 |
| 624 | | | | | | | | | | | | | | | | | | |
| Phage- | I | A | — | W | — | D | W | E | D | Y | S | S | — | P | 0.08 | 0.21 | 0.11 | 2386 |
| 625 | | | | | | | | | | | | | | | | | | |
| Phage- | Y | — | — | — | — | — | V | E | D | I | N | D | — | I | 0.09 | 0.21 | 0.07 | 2387 |
| 626 | | | | | | | | | | | | | | | | | | |
| Phage- | N | I | — | — | — | — | M | — | — | — | I | D | — | I | 0.08 | 0.21 | 0.07 | 2388 |
| 627 | | | | | | | | | | | | | | | | | | |
| Phage- | F | D | — | W | — | D | W | E | — | L | — | S | — | Y | 0.07 | 0.21 | 0.08 | 2389 |
| 628 | | | | | | | | | | | | | | | | | | |
| Phage- | Y | F | I | — | — | — | W | E | D | H | F | F | — | D | 0.09 | 0.21 | 0.19 | 2390 |
| 629 | | | | | | | | | | | | | | | | | | |
| Phage- | T | — | — | — | — | — | — | E | — | D | S | Y | — | D | 0.12 | 0.20 | 0.09 | 2391 |
| 630 | | | | | | | | | | | | | | | | | | |
| Phage- | N | L | — | — | — | — | V | E | L | I | D | I | — | S | 0.11 | 0.20 | 0.09 | 2392 |
| 631 | | | | | | | | | | | | | | | | | | |
| Phage- | D | N | — | — | — | — | W | E | — | V | Y | L | — | N | 0.08 | 0.20 | 0.08 | 2393 |
| 632 | | | | | | | | | | | | | | | | | | |
| Phage- | F | L | — | — | — | — | — | — | — | — | D | L | — | F | 0.08 | 0.20 | 0.09 | 2394 |
| 633 | | | | | | | | | | | | | | | | | | |
| Phage- | H | I | — | — | — | — | Q | — | — | — | I | — | — | T | 0.09 | 0.20 | 0.19 | 2395 |
| 634 | | | | | | | | | | | | | | | | | | |
| Phage- | F | D | — | W | — | D | W | E | D | N | S | Y | — | D | 0.10 | 0.20 | 0.09 | 2396 |
| 635 | | | | | | | | | | | | | | | | | | |
| Phage- | T | A | — | — | — | — | W | E | F | D | F | N | — | D | 0.08 | 0.20 | 0.07 | 2397 |
| 636 | | | | | | | | | | | | | | | | | | |
| Phage- | H | H | — | W | — | D | W | E | D | Y | S | T | — | P | 0.10 | 0.20 | 0.11 | 2398 |
| 637 | | | | | | | | | | | | | | | | | | |
| Phage- | Y | — | — | — | — | — | — | — | — | — | — | N | — | F | 0.07 | 0.20 | 0.08 | 2399 |
| 638 | | | | | | | | | | | | | | | | | | |
| Phage- | L | H | — | W | — | D | W | E | — | I | D | I | — | D | 0.08 | 0.20 | 0.09 | 2400 |
| 639 | | | | | | | | | | | | | | | | | | |
| Phage- | D | I | — | — | — | D | G | Q | — | D | F | V | — | S | 0.08 | 0.20 | 0.09 | 2401 |
| 640 | | | | | | | | | | | | | | | | | | |
| Phage- | D | V | — | W | — | D | W | E | V | N | Y | F | — | D | 0.09 | 0.20 | 0.07 | 2402 |
| 641 | | | | | | | | | | | | | | | | | | |
| Phage- | — | N | — | — | — | — | M | — | — | — | I | D | — | A | 0.12 | 0.20 | 0.10 | 2403 |
| 642 | | | | | | | | | | | | | | | | | | |
| Phage- | D | N | — | — | — | — | — | — | — | A | T | V | — | N | 0.11 | 0.19 | 0.19 | 2404 |
| 643 | | | | | | | | | | | | | | | | | | |
| Phage- | D | L | — | — | — | — | — | E | — | V | H | N | — | N | 0.08 | 0.19 | 0.08 | 2405 |
| 644 | | | | | | | | | | | | | | | | | | |
| Phage- | — | N | — | — | — | — | — | — | — | — | S | Y | — | F | 0.13 | 0.19 | 0.09 | 2406 |
| 645 | | | | | | | | | | | | | | | | | | |
| Phage- | N | I | — | W | — | D | W | E | — | D | N | F | — | S | 0.08 | 0.19 | 0.08 | 2407 |
| 646 | | | | | | | | | | | | | | | | | | |
| Phage- | F | V | — | — | — | — | W | E | V | Y | D | D | — | D | 0.08 | 0.19 | 0.08 | 2408 |
| 647 | | | | | | | | | | | | | | | | | | |
| Phage- | A | — | — | — | — | — | L | E | V | V | H | L | — | V | 0.10 | 0.19 | 0.17 | 2409 |
| 648 | | | | | | | | | | | | | | | | | | |
| Phage- | P | F | — | — | — | — | M | — | — | T | I | D | — | Y | 0.07 | 0.19 | 0.09 | 2410 |
| 649 | | | | | | | | | | | | | | | | | | |
| Phage- | L | L | — | — | — | V | M | E | D | V | F | A | — | Y | 0.08 | 0.19 | 0.08 | 2411 |
| 650 | | | | | | | | | | | | | | | | | | |
| Phage- | D | L | — | — | — | — | — | — | — | — | T | N | — | Y | 0.07 | 0.19 | 0.08 | 2412 |
| 651 | | | | | | | | | | | | | | | | | | |
| Phage- | H | D | — | — | — | — | M | E | — | Y | Y | L | — | P | 0.10 | 0.18 | 0.10 | 2413 |
| 652 | | | | | | | | | | | | | | | | | | |
| Phage- | T | D | — | — | — | — | Y | — | — | — | I | I | — | P | 0.08 | 0.18 | 0.09 | 2414 |
| 653 | | | | | | | | | | | | | | | | | | |
| Phage- | — | L | — | W | — | D | W | E | D | Y | A | D | — | N | 0.09 | 0.18 | 0.08 | 2415 |
| 654 | | | | | | | | | | | | | | | | | | |
| Phage- | N | D | — | — | — | — | L | — | — | — | L | T | — | D | 0.07 | 0.18 | 0.09 | 2416 |
| 655 | | | | | | | | | | | | | | | | | | |
| Phage- | I | — | — | — | — | — | L | — | — | — | I | A | — | Y | 0.11 | 0.18 | 0.08 | 2417 |
| 656 | | | | | | | | | | | | | | | | | | |
| Phage- | N | — | — | — | — | — | V | E | — | F | N | F | — | H | 0.11 | 0.18 | 0.14 | 2418 |
| 657 | | | | | | | | | | | | | | | | | | |
| Phage- | D | V | — | — | — | — | I | E | — | Y | S | F | — | I | 0.08 | 0.18 | 0.09 | 2419 |
| 658 | | | | | | | | | | | | | | | | | | |
| Phage- | D | L | — | — | — | — | V | E | — | I | T | D | — | A | 0.10 | 0.18 | 0.12 | 2420 |
| 659 | | | | | | | | | | | | | | | | | | |
| Phage- | H | D | — | — | — | — | — | — | — | — | — | F | — | I | 0.12 | 0.18 | 0.12 | 2421 |
| 660 | | | | | | | | | | | | | | | | | | |
| Phage- | P | L | — | — | — | V | L | E | — | D | I | Y | — | Y | 0.10 | 0.18 | 0.13 | 2422 |
| 661 | | | | | | | | | | | | | | | | | | |
| Phage- | D | L | — | — | — | — | — | E | D | I | I | D | — | N | 0.10 | 0.18 | 0.11 | 2423 |
| 662 | | | | | | | | | | | | | | | | | | |
| Phage- | D | — | — | — | — | — | V | E | V | P | S | N | — | N | 0.10 | 0.18 | 0.18 | 2424 |
| 663 | | | | | | | | | | | | | | | | | | |
| Phage- | I | I | — | — | — | — | L | — | — | — | T | A | — | D | 0.10 | 0.18 | 0.09 | 2425 |
| 664 | | | | | | | | | | | | | | | | | | |
| Phage- | D | H | — | — | — | — | — | — | — | — | — | N | — | D | 0.10 | 0.18 | 0.14 | 2426 |
| 665 | | | | | | | | | | | | | | | | | | |
| Phage- | F | D | — | — | — | — | — | — | — | — | L | Y | — | S | 0.07 | 0.18 | 0.07 | 2427 |
| 666 | | | | | | | | | | | | | | | | | | |
| Phage- | F | A | — | W | — | D | W | E | — | V | Y | I | — | Y | 0.08 | 0.18 | 0.08 | 2428 |
| 667 | | | | | | | | | | | | | | | | | | |
| Phage- | L | — | — | — | — | — | — | — | — | — | L | D | — | S | 0.08 | 0.18 | 0.09 | 2429 |
| 668 | | | | | | | | | | | | | | | | | | |
| Phage- | D | L | — | — | — | — | L | E | — | A | F | L | — | A | 0.09 | 0.18 | 0.08 | 2430 |
| 669 | | | | | | | | | | | | | | | | | | |
| Phage- | F | A | — | — | — | — | L | — | — | T | L | T | — | L | 0.10 | 0.18 | 0.08 | 2431 |
| 670 | | | | | | | | | | | | | | | | | | |
| Phage- | F | D | — | — | — | — | V | E | — | I | S | N | — | D | 0.17 | 0.18 | 0.10 | 2432 |
| 671 | | | | | | | | | | | | | | | | | | |
| Phage- | — | H | — | — | — | — | L | E | Y | P | F | D | — | N | 0.09 | 0.17 | 0.16 | 2433 |
| 672 | | | | | | | | | | | | | | | | | | |
| Phage- | A | — | — | — | — | — | — | E | — | H | T | T | — | N | 0.10 | 0.17 | 0.15 | 2434 |
| 673 | | | | | | | | | | | | | | | | | | |
| Phage- | L | — | — | — | — | V | S | E | Q | F | T | F | — | I | 0.08 | 0.17 | 0.08 | 2435 |
| 674 | | | | | | | | | | | | | | | | | | |
| Phage- | D | — | — | — | — | — | L | — | — | — | Y | D | — | N | 0.10 | 0.17 | 0.09 | 2436 |
| 675 | | | | | | | | | | | | | | | | | | |
| Phage- | F | — | — | — | — | — | W | E | — | F | D | V | — | I | 0.13 | 0.17 | 0.15 | 2437 |
| 676 | | | | | | | | | | | | | | | | | | |
| Phage- | F | T | — | — | — | — | V | E | — | Y | D | H | — | I | 0.08 | 0.17 | 0.09 | 2438 |
| 677 | | | | | | | | | | | | | | | | | | |
| Phage- | Y | N | — | — | — | — | — | — | — | — | — | T | — | F | 0.12 | 0.17 | 0.11 | 2439 |
| 678 | | | | | | | | | | | | | | | | | | |
| Phage- | A | V | — | — | — | — | N | — | — | — | N | S | — | A | 0.08 | 0.17 | 0.08 | 2440 |
| 679 | | | | | | | | | | | | | | | | | | |
| Phage- | I | — | — | W | — | D | W | E | V | P | N | D | — | A | 0.10 | 0.17 | 0.09 | 2441 |
| 680 | | | | | | | | | | | | | | | | | | |
| Phage- | Y | F | — | — | — | — | — | E | — | F | F | H | — | Y | 0.12 | 0.17 | 0.12 | 2442 |
| 681 | | | | | | | | | | | | | | | | | | |
| Phage- | Y | V | — | — | — | D | G | — | — | — | S | F | — | D | 0.12 | 0.17 | 0.12 | 2443 |
| 682 | | | | | | | | | | | | | | | | | | |
| Phage- | I | S | — | — | — | — | V | E | — | F | F | Y | — | Y | 0.10 | 0.17 | 0.08 | 2444 |
| 683 | | | | | | | | | | | | | | | | | | |
| Phage- | L | I | — | — | — | V | — | E | — | D | — | Y | — | D | 0.17 | 0.17 | 0.15 | 2445 |
| 684 | | | | | | | | | | | | | | | | | | |
| Phage- | — | — | — | — | — | — | V | E | D | H | N | Y | — | A | 0.14 | 0.17 | 0.16 | 2446 |
| 685 | | | | | | | | | | | | | | | | | | |
| Phage- | L | D | — | — | — | — | — | E | F | V | Y | I | — | A | 0.08 | 0.17 | 0.10 | 2447 |
| 686 | | | | | | | | | | | | | | | | | | |
| Phage- | Y | D | — | — | — | — | — | E | — | D | L | P | — | I | 0.17 | 0.17 | 0.11 | 2448 |
| 687 | | | | | | | | | | | | | | | | | | |
| Phage- | D | V | — | — | — | — | V | E | — | D | Y | Y | — | D | 0.10 | 0.17 | 0.14 | 2449 |
| 688 | | | | | | | | | | | | | | | | | | |
| Phage- | N | D | — | W | — | D | W | E | Y | D | N | V | — | V | 0.08 | 0.17 | 0.10 | 2450 |
| 689 | | | | | | | | | | | | | | | | | | |
| Phage- | D | L | — | — | — | — | — | E | V | A | N | D | — | N | 0.10 | 0.16 | 0.16 | 2451 |
| 690 | | | | | | | | | | | | | | | | | | |
| Phage- | H | D | — | — | — | — | L | — | — | — | I | S | — | N | 0.09 | 0.16 | 0.07 | 2452 |
| 691 | | | | | | | | | | | | | | | | | | |
| Phage- | L | D | — | W | — | D | W | E | — | T | T | H | — | D | 0.08 | 0.16 | 0.08 | 2453 |
| 692 | | | | | | | | | | | | | | | | | | |
| Phage- | I | I | — | — | — | — | V | E | — | D | D | Y | — | L | 0.09 | 0.16 | 0.09 | 2454 |
| 693 | | | | | | | | | | | | | | | | | | |
| Phage- | Y | — | — | W | — | D | W | E | — | V | I | I | — | D | 0.09 | 0.16 | 0.09 | 2455 |
| 694 | | | | | | | | | | | | | | | | | | |
| Phage- | F | D | — | — | — | — | I | — | — | Y | T | N | — | N | 0.12 | 0.16 | 0.09 | 2456 |
| 695 | | | | | | | | | | | | | | | | | | |
| Phage- | I | T | — | — | — | — | L | — | — | T | I | N | — | D | 0.08 | 0.16 | 0.11 | 2457 |
| 696 | | | | | | | | | | | | | | | | | | |
| Phage- | D | S | — | — | — | — | V | E | — | D | I | Y | — | I | 0.07 | 0.16 | 0.08 | 2458 |
| 697 | | | | | | | | | | | | | | | | | | |
| Phage- | Y | L | — | — | — | — | — | — | — | — | G | N | — | H | 0.07 | 0.16 | 0.08 | 2459 |
| 698 | | | | | | | | | | | | | | | | | | |
| Phage- | D | N | — | — | — | — | L | P | — | D | Y | F | — | D | 0.08 | 0.16 | 0.10 | 2460 |
| 699 | | | | | | | | | | | | | | | | | | |
| Phage- | — | L | — | — | — | — | — | E | — | V | S | N | — | N | 0.11 | 0.16 | 0.08 | 2461 |
| 700 | | | | | | | | | | | | | | | | | | |
| Phage- | — | D | — | W | — | D | W | E | — | D | I | V | — | D | 0.10 | 0.16 | 0.09 | 2462 |
| 701 | | | | | | | | | | | | | | | | | | |
| Phage- | — | — | — | W | — | D | W | E | D | N | F | P | — | Y | 0.07 | 0.16 | 0.07 | 2463 |
| 702 | | | | | | | | | | | | | | | | | | |
| Phage- | D | — | — | — | — | — | V | E | — | H | F | N | — | H | 0.08 | 0.16 | 0.08 | 2464 |
| 703 | | | | | | | | | | | | | | | | | | |
| Phage- | A | D | — | — | — | — | I | E | — | D | A | Y | — | Y | 0.12 | 0.16 | 0.09 | 2465 |
| 704 | | | | | | | | | | | | | | | | | | |
| Phage- | I | L | — | W | — | D | W | E | D | A | T | F | — | Y | 0.09 | 0.16 | 0.07 | 2466 |
| 705 | | | | | | | | | | | | | | | | | | |
| Phage- | I | H | — | W | — | D | W | E | D | F | N | I | — | P | 0.09 | 0.16 | 0.08 | 2467 |
| 706 | | | | | | | | | | | | | | | | | | |
| Phage- | T | I | — | — | — | — | V | E | D | Y | N | D | — | I | 0.07 | 0.16 | 0.07 | 2468 |
| 707 | | | | | | | | | | | | | | | | | | |
| Phage- | D | D | — | — | — | — | L | — | — | — | — | A | — | I | 0.08 | 0.16 | 0.08 | 2469 |
| 708 | | | | | | | | | | | | | | | | | | |
| Phage- | D | D | — | W | — | D | W | E | D | H | I | F | — | F | 0.13 | 0.16 | 0.08 | 2470 |
| 709 | | | | | | | | | | | | | | | | | | |
| Phage- | — | N | — | — | — | — | V | E | — | I | I | F | — | D | 0.12 | 0.15 | 0.12 | 2471 |
| 710 | | | | | | | | | | | | | | | | | | |
| Phage- | I | F | — | W | — | D | W | E | D | D | T | V | — | I | 0.08 | 0.15 | 0.09 | 2472 |
| 711 | | | | | | | | | | | | | | | | | | |
| Phage- | I | I | — | — | — | — | — | E | — | I | S | D | — | L | 0.12 | 0.15 | 0.15 | 2473 |
| 712 | | | | | | | | | | | | | | | | | | |
| Phage- | F | D | — | — | — | — | V | E | — | Y | N | D | — | D | 0.11 | 0.15 | 0.09 | 2474 |
| 713 | | | | | | | | | | | | | | | | | | |
| Phage- | N | D | — | — | — | — | L | — | — | T | L | Y | — | I | 0.08 | 0.15 | 0.10 | 2475 |
| 714 | | | | | | | | | | | | | | | | | | |
| Phage- | A | I | — | — | — | — | L | E | — | D | I | S | — | N | 0.12 | 0.15 | 0.17 | 2476 |
| 715 | | | | | | | | | | | | | | | | | | |
| Phage- | H | L | — | — | — | — | — | — | — | — | T | N | — | Y | 0.07 | 0.15 | 0.07 | 2477 |
| 716 | | | | | | | | | | | | | | | | | | |
| Phage- | S | — | — | — | — | — | L | — | — | — | — | A | — | I | 0.10 | 0.15 | 0.11 | 2478 |
| 717 | | | | | | | | | | | | | | | | | | |
| Phage- | L | — | — | — | — | — | — | E | — | L | A | D | — | T | 0.08 | 0.15 | 0.08 | 2479 |
| 718 | | | | | | | | | | | | | | | | | | |
| Phage- | I | D | — | — | — | — | L | — | — | — | I | A | — | N | 0.07 | 0.15 | 0.08 | 2480 |
| 719 | | | | | | | | | | | | | | | | | | |
| Phage- | F | D | — | — | — | D | G | Q | — | D | L | V | — | N | 0.10 | 0.15 | 0.08 | 2481 |
| 720 | | | | | | | | | | | | | | | | | | |
| Phage- | N | L | — | — | — | — | — | E | — | F | F | D | — | Y | 0.09 | 0.15 | 0.15 | 2482 |
| 721 | | | | | | | | | | | | | | | | | | |
| Phage- | S | I | — | — | — | — | L | Q | — | D | I | V | — | P | 0.09 | 0.14 | 0.14 | 2483 |
| 722 | | | | | | | | | | | | | | | | | | |
| Phage- | N | P | — | — | — | — | Y | — | — | — | A | H | — | D | 0.08 | 0.14 | 0.08 | 2484 |
| 723 | | | | | | | | | | | | | | | | | | |
| Phage- | Y | D | — | — | — | — | L | — | — | Y | Y | N | — | N | 0.12 | 0.14 | 0.11 | 2485 |
| 724 | | | | | | | | | | | | | | | | | | |
| Phage- | — | D | — | — | — | — | L | — | — | T | I | F | — | D | 0.07 | 0.14 | 0.08 | 2486 |
| 725 | | | | | | | | | | | | | | | | | | |
| Phage- | D | N | — | — | — | — | L | — | — | — | — | T | — | T | 0.09 | 0.14 | 0.10 | 2487 |
| 726 | | | | | | | | | | | | | | | | | | |
| Phage- | — | D | — | — | — | — | L | — | — | — | S | Y | — | D | 0.10 | 0.14 | 0.13 | 2488 |
| 727 | | | | | | | | | | | | | | | | | | |
| Phage- | Y | — | — | — | — | — | — | E | F | I | D | F | — | F | 0.07 | 0.14 | 0.07 | 2489 |
| 728 | | | | | | | | | | | | | | | | | | |
| Phage- | Y | D | — | W | — | D | W | E | V | I | T | Y | — | N | 0.08 | 0.14 | 0.09 | 2490 |
| 729 | | | | | | | | | | | | | | | | | | |
| Phage- | F | D | — | — | — | — | I | E | — | D | F | F | — | V | 0.06 | 0.14 | 0.07 | 2491 |
| 730 | | | | | | | | | | | | | | | | | | |
| Phage- | I | F | — | W | — | D | W | — | D | I | N | F | — | D | 0.10 | 0.14 | 0.14 | 2492 |
| 731 | | | | | | | | | | | | | | | | | | |
| Phage- | N | F | — | — | — | — | L | P | — | D | I | T | — | Y | 0.37 | 0.14 | 0.09 | 2493 |
| 732 | | | | | | | | | | | | | | | | | | |
| Phage- | S | L | — | — | — | — | — | E | — | Y | Y | H | — | L | 0.09 | 0.14 | 0.07 | 2494 |
| 733 | | | | | | | | | | | | | | | | | | |
| Phage- | A | S | — | — | — | — | L | — | — | — | L | D | — | L | 0.12 | 0.14 | 0.13 | 2495 |
| 734 | | | | | | | | | | | | | | | | | | |
| Phage- | S | F | — | — | — | — | R | E | W | D | L | A | — | Y | 0.09 | 0.14 | 0.08 | 2496 |
| 735 | | | | | | | | | | | | | | | | | | |
| Phage- | H | L | — | — | — | — | — | E | D | V | L | D | — | I | 0.08 | 0.14 | 0.12 | 2497 |
| 736 | | | | | | | | | | | | | | | | | | |
| Phage- | L | D | — | — | — | D | G | — | — | F | Y | Y | — | L | 0.20 | 0.14 | 0.09 | 2498 |
| 737 | | | | | | | | | | | | | | | | | | |
| Phage- | D | N | — | W | — | D | W | E | — | D | I | A | — | T | 0.16 | 0.14 | 0.11 | 2499 |
| 738 | | | | | | | | | | | | | | | | | | |
| Phage- | S | D | — | — | — | — | L | — | — | T | I | H | — | I | 0.09 | 0.14 | 0.08 | 2500 |
| 739 | | | | | | | | | | | | | | | | | | |
| Phage- | N | S | — | — | — | D | G | — | — | — | — | D | — | L | 0.08 | 0.14 | 0.08 | 2501 |
| 740 | | | | | | | | | | | | | | | | | | |
| Phage- | D | L | — | — | — | — | L | — | — | — | T | L | — | I | 0.07 | 0.14 | 0.08 | 2502 |
| 741 | | | | | | | | | | | | | | | | | | |
| Phage- | F | D | — | — | — | — | S | — | — | — | F | N | — | Y | 0.09 | 0.14 | 0.11 | 2503 |
| 742 | | | | | | | | | | | | | | | | | | |
| Phage- | D | L | — | — | — | — | — | E | — | D | D | I | — | Y | 0.12 | 0.14 | 0.13 | 2504 |
| 743 | | | | | | | | | | | | | | | | | | |
| Phage- | H | A | — | — | — | — | — | E | — | D | T | Y | — | F | 0.10 | 0.14 | 0.14 | 2505 |
| 744 | | | | | | | | | | | | | | | | | | |
| Phage- | S | D | — | — | — | — | L | — | — | — | — | A | — | T | 0.11 | 0.14 | 0.08 | 2506 |
| 745 | | | | | | | | | | | | | | | | | | |
| Phage- | I | V | — | — | — | — | L | P | — | D | Y | N | — | Y | 0.09 | 0.13 | 0.11 | 2507 |
| 746 | | | | | | | | | | | | | | | | | | |
| Phage- | D | L | — | — | — | — | — | — | — | I | F | I | — | F | 0.09 | 0.13 | 0.08 | 2508 |
| 747 | | | | | | | | | | | | | | | | | | |
| Phage- | Y | D | — | — | — | — | — | — | — | T | L | T | — | N | 0.13 | 0.13 | 0.08 | 2509 |
| 748 | | | | | | | | | | | | | | | | | | |
| Phage- | Y | D | — | — | — | — | V | E | — | T | — | N | — | D | 0.11 | 0.13 | 0.12 | 2510 |
| 749 | | | | | | | | | | | | | | | | | | |
| Phage- | — | F | — | — | — | — | I | E | D | D | H | V | — | I | 0.07 | 0.13 | 0.07 | 2511 |
| 750 | | | | | | | | | | | | | | | | | | |
| Phage- | F | I | — | — | — | — | W | E | D | D | Y | A | — | S | 0.12 | 0.13 | 0.12 | 2512 |
| 751 | | | | | | | | | | | | | | | | | | |
| Phage- | N | F | — | — | — | — | — | — | — | — | — | — | — | N | 0.10 | 0.13 | 0.09 | 2513 |
| 752 | | | | | | | | | | | | | | | | | | |
| Phage- | N | L | — | — | — | — | V | E | — | I | L | I | — | D | 0.07 | 0.13 | 0.07 | 2514 |
| 753 | | | | | | | | | | | | | | | | | | |
| Phage- | D | S | — | — | — | — | V | E | — | Y | D | L | — | N | 0.11 | 0.13 | 0.08 | 2515 |
| 754 | | | | | | | | | | | | | | | | | | |
| Phage- | T | L | — | — | — | — | — | E | — | T | T | D | — | N | 0.09 | 0.13 | 0.08 | 2516 |
| 755 | | | | | | | | | | | | | | | | | | |
| Phage- | T | V | — | — | — | K | M | E | M | N | S | T | — | D | 0.09 | 0.13 | 0.09 | 2517 |
| 756 | | | | | | | | | | | | | | | | | | |
| Phage- | — | H | — | W | — | D | W | E | D | A | — | S | — | N | 0.10 | 0.12 | 0.11 | 2518 |
| 757 | | | | | | | | | | | | | | | | | | |
| Phage- | D | L | — | — | — | D | G | N | — | L | D | F | — | F | 0.08 | 0.12 | 0.08 | 2519 |
| 758 | | | | | | | | | | | | | | | | | | |
| Phage- | D | L | — | — | — | D | G | E | — | H | Y | Y | — | D | 0.09 | 0.12 | 0.07 | 2520 |
| 759 | | | | | | | | | | | | | | | | | | |
| Phage- | F | N | — | — | — | — | V | E | — | I | L | L | — | T | 0.11 | 0.12 | 0.12 | 2521 |
| 760 | | | | | | | | | | | | | | | | | | |
| Phage- | H | — | — | — | — | — | V | E | N | I | N | D | — | I | 0.09 | 0.12 | 0.07 | 2522 |
| 761 | | | | | | | | | | | | | | | | | | |
| Phage- | I | D | — | — | — | — | L | — | — | — | — | I | — | D | 0.09 | 0.12 | 0.08 | 2523 |
| 762 | | | | | | | | | | | | | | | | | | |
| Phage- | I | F | — | — | — | — | I | E | Q | P | A | L | — | Y | 0.08 | 0.12 | 0.09 | 2524 |
| 763 | | | | | | | | | | | | | | | | | | |
| Phage- | Y | D | — | — | — | — | — | Q | — | D | L | V | — | P | 0.10 | 0.12 | 0.08 | 2525 |
| 764 | | | | | | | | | | | | | | | | | | |
| Phage- | H | A | — | W | — | D | W | E | — | P | N | Y | — | D | 0.13 | 0.12 | 0.09 | 2526 |
| 765 | | | | | | | | | | | | | | | | | | |
| Phage- | N | V | — | W | — | D | W | E | — | D | Y | N | — | Y | 0.11 | 0.12 | 0.10 | 2527 |
| 766 | | | | | | | | | | | | | | | | | | |
| Phage- | S | F | — | — | Q | — | L | G | D | N | Y | D | — | I | 0.09 | 0.12 | 0.12 | 2528 |
| 767 | | | | | | | | | | | | | | | | | | |
| Phage- | D | D | — | — | — | — | L | — | — | T | T | V | — | Y | 0.08 | 0.12 | 0.09 | 2529 |
| 768 | | | | | | | | | | | | | | | | | | |
| Phage- | N | F | — | — | — | — | W | E | V | A | T | L | — | L | 0.09 | 0.12 | 0.14 | 2530 |
| 769 | | | | | | | | | | | | | | | | | | |
| Phage- | D | L | — | — | — | — | V | E | — | D | T | Y | — | N | 0.09 | 0.11 | 0.07 | 2531 |
| 770 | | | | | | | | | | | | | | | | | | |
| Phage- | A | L | — | — | — | — | V | E | Q | V | D | L | — | T | 0.08 | 0.11 | 0.08 | 2532 |
| 771 | | | | | | | | | | | | | | | | | | |
| Phage- | D | D | — | — | — | — | L | — | — | — | — | N | — | N | 0.08 | 0.11 | 0.08 | 2533 |
| 772 | | | | | | | | | | | | | | | | | | |
| Phage- | I | F | — | — | — | — | — | E | Q | I | I | Y | — | D | 0.09 | 0.11 | 0.11 | 2534 |
| 773 | | | | | | | | | | | | | | | | | | |
| Phage- | S | D | — | W | — | D | W | E | — | V | Y | Y | — | S | 0.09 | 0.11 | 0.10 | 2535 |
| 774 | | | | | | | | | | | | | | | | | | |
| Phage- | F | F | — | — | — | D | G | — | — | V | A | I | — | D | 0.09 | 0.11 | 0.07 | 2536 |
| 775 | | | | | | | | | | | | | | | | | | |
| Phage- | D | D | — | W | — | D | W | E | D | D | — | Y | — | Y | 0.11 | 0.11 | 0.07 | 2537 |
| 776 | | | | | | | | | | | | | | | | | | |
| Phage- | Y | D | — | — | — | — | — | — | — | T | — | V | — | P | 0.08 | 0.11 | 0.08 | 2538 |
| 777 | | | | | | | | | | | | | | | | | | |
| Phage- | S | — | — | — | — | — | L | — | — | — | — | N | — | V | 0.10 | 0.11 | 0.08 | 2539 |
| 778 | | | | | | | | | | | | | | | | | | |
| Phage- | A | F | — | V | S | F | Q | Q | S | L | P | H | — | D | 0.09 | 0.11 | 0.10 | 2540 |
| 779 | | | | | | | | | | | | | | | | | | |
| Phage- | — | N | — | — | — | — | V | E | — | Y | F | V | — | F | 0.09 | 0.11 | 0.09 | 2541 |
| 780 | | | | | | | | | | | | | | | | | | |
| Phage- | T | N | — | W | — | D | W | E | — | D | F | A | — | V | 0.07 | 0.11 | 0.08 | 2542 |
| 781 | | | | | | | | | | | | | | | | | | |
| Phage- | D | D | — | — | — | — | — | E | — | I | I | L | — | F | 0.08 | 0.10 | 0.08 | 2543 |
| 782 | | | | | | | | | | | | | | | | | | |
| Phage- | N | S | — | — | — | — | L | E | D | Y | H | L | — | P | 0.08 | 0.10 | 0.10 | 2544 |
| 783 | | | | | | | | | | | | | | | | | | |
| Phage- | I | H | — | — | — | D | S | — | G | F | D | F | — | D | 0.09 | 0.10 | 0.08 | 2545 |
| 784 | | | | | | | | | | | | | | | | | | |
| Phage- | F | D | — | — | — | — | L | E | — | D | H | L | — | F | 0.08 | 0.10 | 0.08 | 2546 |
| 785 | | | | | | | | | | | | | | | | | | |
| Phage- | T | V | — | W | — | D | — | E | — | Y | A | D | — | D | 0.10 | 0.10 | 0.08 | 2547 |
| 786 | | | | | | | | | | | | | | | | | | |
| Phage- | Y | F | — | W | — | D | W | E | — | A | A | D | — | L | 0.09 | 0.10 | 0.09 | 2548 |
| 787 | | | | | | | | | | | | | | | | | | |
| Phage- | — | S | — | — | — | — | — | — | — | — | — | D | — | I | 0.08 | 0.10 | 0.07 | 2549 |
| 788 | | | | | | | | | | | | | | | | | | |
| Phage- | A | V | — | — | — | — | L | P | — | D | I | V | — | Y | 0.08 | 0.10 | 0.08 | 2550 |
| 789 | | | | | | | | | | | | | | | | | | |
| Phage- | — | L | — | — | — | — | V | E | — | Y | H | L | — | A | 0.08 | 0.10 | 0.30 | 2551 |
| 790 | | | | | | | | | | | | | | | | | | |
| Phage- | S | L | — | W | — | D | W | E | — | V | D | N | — | F | 0.12 | 0.10 | 0.11 | 2552 |
| 791 | | | | | | | | | | | | | | | | | | |
| Phage- | T | I | — | — | — | D | G | Q | — | D | Y | N | — | H | 0.07 | 0.10 | 0.07 | 2553 |
| 792 | | | | | | | | | | | | | | | | | | |
| Phage- | F | L | — | — | — | — | G | E | P | T | Y | L | — | T | 0.12 | 0.10 | 0.09 | 2554 |
| 793 | | | | | | | | | | | | | | | | | | |
| Phage- | D | D | — | W | L | — | Q | H | D | I | Y | V | — | A | 0.10 | 0.10 | 0.08 | 2555 |
| 794 | | | | | | | | | | | | | | | | | | |
| Phage- | I | F | — | — | — | — | V | E | — | V | A | F | — | F | 0.07 | 0.10 | 0.08 | 2556 |
| 795 | | | | | | | | | | | | | | | | | | |
| Phage- | A | L | — | — | — | — | V | E | D | D | Y | D | — | L | 0.09 | 0.10 | 0.09 | 2557 |
| 796 | | | | | | | | | | | | | | | | | | |
| Phage- | D | D | — | — | — | — | I | E | L | Y | L | T | — | A | 0.08 | 0.10 | 0.08 | 2558 |
| 797 | | | | | | | | | | | | | | | | | | |
| Phage- | T | D | — | W | — | D | W | E | D | D | S | I | — | D | 0.07 | 0.10 | 0.07 | 2559 |
| 798 | | | | | | | | | | | | | | | | | | |
| Phage- | S | I | — | — | — | — | L | E | — | I | F | L | — | N | 0.08 | 0.10 | 0.08 | 2560 |
| 799 | | | | | | | | | | | | | | | | | | |
| Phage- | N | D | — | — | — | — | L | E | — | D | I | L | — | F | 0.07 | 0.10 | 0.09 | 2561 |
| 800 | | | | | | | | | | | | | | | | | | |
| Phage- | D | D | — | — | — | — | L | — | — | T | Y | S | — | Y | 0.09 | 0.09 | 0.08 | 2562 |
| 801 | | | | | | | | | | | | | | | | | | |
| Phage- | F | V | — | — | — | — | W | E | — | I | D | L | — | I | 0.10 | 0.09 | 0.09 | 2563 |
| 802 | | | | | | | | | | | | | | | | | | |
| Phage- | Y | D | — | — | — | — | L | — | — | — | L | S | — | P | 0.07 | 0.09 | 0.07 | 2564 |
| 803 | | | | | | | | | | | | | | | | | | |
| Phage- | N | L | — | — | — | — | L | — | — | — | I | I | — | P | 0.08 | 0.09 | 0.08 | 2565 |
| 804 | | | | | | | | | | | | | | | | | | |
| Phage- | I | D | — | W | — | D | W | E | — | F | N | N | — | F | 0.08 | 0.09 | 0.09 | 2566 |
| 805 | | | | | | | | | | | | | | | | | | |
| Phage- | A | — | — | — | — | — | L | E | — | H | D | Y | — | Y | 0.08 | 0.09 | 0.09 | 2567 |
| 806 | | | | | | | | | | | | | | | | | | |
| Phage- | D | D | — | S | — | Q | — | — | Q | I | D | L | — | D | 0.14 | 0.09 | 0.09 | 2568 |
| 807 | | | | | | | | | | | | | | | | | | |
| Phage- | S | — | — | — | — | — | S | — | — | — | I | Y | — | Y | 0.08 | 0.09 | 0.07 | 2569 |
| 808 | | | | | | | | | | | | | | | | | | |
| Phage- | S | L | — | — | — | — | — | Q | — | D | A | P | — | N | 0.07 | 0.09 | 0.07 | 2570 |
| 809 | | | | | | | | | | | | | | | | | | |
| Phage- | D | A | — | — | — | — | L | — | — | T | T | H | — | D | 0.09 | 0.09 | 0.08 | 2571 |
| 810 | | | | | | | | | | | | | | | | | | |
| Phage- | N | D | — | — | — | | V | E | — | V | A | D | — | F | 0.07 | 0.09 | 0.08 | 2572 |
| 811 | | | | | | | | | | | | | | | | | | |
| Phage- | Y | I | — | — | — | — | — | E | Q | D | Y | F | — | F | 0.08 | 0.09 | 0.08 | 2573 |
| 812 | | | | | | | | | | | | | | | | | | |
| Phage- | T | D | — | — | — | D | G | — | — | T | N | Y | — | F | 0.11 | 0.09 | 0.08 | 2574 |
| 813 | | | | | | | | | | | | | | | | | | |
| Phage- | Y | D | — | — | — | — | V | — | — | — | — | L | — | P | 0.08 | 0.09 | 0.08 | 2575 |
| 814 | | | | | | | | | | | | | | | | | | |
| Phage- | I | D | — | — | — | — | — | — | — | — | A | Y | — | T | 0.08 | 0.09 | 0.08 | 2576 |
| 815 | | | | | | | | | | | | | | | | | | |
| Phage- | F | D | — | — | — | — | — | E | — | F | F | H | — | Y | 0.09 | 0.09 | 0.09 | 2577 |
| 816 | | | | | | | | | | | | | | | | | | |
| Phage- | F | P | — | — | — | — | I | E | — | Y | D | Y | — | V | 0.09 | 0.09 | 0.08 | 2578 |
| 817 | | | | | | | | | | | | | | | | | | |
| Phage- | A | D | — | — | — | I | — | E | S | I | D | I | — | V | 0.09 | 0.09 | 0.07 | 2579 |
| 818 | | | | | | | | | | | | | | | | | | |
| Phage- | I | S | — | — | — | D | L | W | P | T | D | I | — | T | 0.10 | 0.09 | 0.10 | 2580 |
| 819 | | | | | | | | | | | | | | | | | | |
| Phage- | D | D | — | — | — | D | G | — | — | V | H | T | — | N | 0.09 | 0.09 | 0.07 | 2581 |
| 820 | | | | | | | | | | | | | | | | | | |
| Phage- | I | D | — | W | — | D | W | E | G | — | F | A | — | N | 0.09 | 0.09 | 0.08 | 2582 |
| 821 | | | | | | | | | | | | | | | | | | |
| Phage- | L | N | — | — | — | D | G | — | — | T | F | Y | — | D | 0.08 | 0.08 | 0.07 | 2583 |
| 822 | | | | | | | | | | | | | | | | | | |
| Phage- | I | H | — | — | — | — | L | G | A | Y | I | S | — | S | 0.08 | 0.08 | 0.09 | 2584 |
| 823 | | | | | | | | | | | | | | | | | | |
| Phage- | T | I | — | W | — | D | W | E | — | D | Y | F | — | Y | 0.08 | 0.08 | 0.08 | 2585 |
| 824 | | | | | | | | | | | | | | | | | | |
| Phage- | H | S | — | L | A | Q | — | — | Q | D | L | V | — | I | 0.07 | 0.08 | 0.07 | 2586 |
| 825 | | | | | | | | | | | | | | | | | | |
| Phage- | N | N | — | A | S | D | L | S | — | D | N | S | — | I | 0.07 | 0.08 | 0.08 | 2587 |
| 826 | | | | | | | | | | | | | | | | | | |
| Phage- | — | N | — | W | — | D | W | E | — | D | — | A | — | N | 0.09 | 0.08 | 0.07 | 2588 |
| 827 | | | | | | | | | | | | | | | | | | |
| Phage- | — | — | — | — | — | — | L | — | — | — | F | Y | — | F | 0.08 | 0.08 | 0.07 | 2589 |
| 828 | | | | | | | | | | | | | | | | | | |
| Phage- | L | F | — | — | T | V | L | — | — | F | F | D | — | D | 0.07 | 0.08 | 0.07 | 2590 |
| 829 | | | | | | | | | | | | | | | | | | |
| Phage- | F | D | — | — | — | — | L | — | — | — | — | S | — | A | 0.08 | 0.08 | 0.07 | 2591 |
| 830 | | | | | | | | | | | | | | | | | | |
| Phage- | Y | — | — | — | — | — | V | E | — | N | — | Y | — | T | 0.07 | 0.08 | 0.08 | 2592 |
| 831 | | | | | | | | | | | | | | | | | | |
| Phage- | D | — | — | — | — | — | L | — | D | — | T | I | — | H | 0.12 | 0.08 | 0.10 | 2593 |
| 832 | | | | | | | | | | | | | | | | | | |
| Phage- | — | F | — | — | — | Q | W | A | — | A | N | A | — | F | 0.09 | 0.08 | 0.07 | 2594 |
| 833 | | | | | | | | | | | | | | | | | | |
| Phage- | F | T | — | — | — | — | Y | — | — | — | I | T | — | P | 0.09 | 0.08 | 0.09 | 2595 |
| 834 | | | | | | | | | | | | | | | | | | |
| Phage- | L | N | — | — | — | V | N | — | — | — | S | V | — | T | 0.07 | 0.08 | 0.08 | 2596 |
| 835 | | | | | | | | | | | | | | | | | | |
| Phage- | A | I | — | W | — | D | W | E | — | F | S | D | — | H | 0.07 | 0.08 | 0.07 | 2597 |
| 836 | | | | | | | | | | | | | | | | | | |
| Phage- | Y | — | — | — | V | D | L | G | A | N | — | Y | — | Y | 0.10 | 0.08 | 0.09 | 2598 |
| 837 | | | | | | | | | | | | | | | | | | |
| Phage- | H | — | — | — | — | — | V | E | — | D | Y | H | — | D | 0.07 | 0.08 | 0.07 | 2599 |
| 838 | | | | | | | | | | | | | | | | | | |
| Phage- | N | D | — | — | S | L | Q | Y | D | I | P | T | — | V | 0.08 | 0.08 | 0.07 | 2600 |
| 839 | | | | | | | | | | | | | | | | | | |
| Phage- | Y | V | — | R | — | Q | L | — | V | Y | H | Y | — | N | 0.15 | 0.08 | 0.07 | 2601 |
| 840 | | | | | | | | | | | | | | | | | | |
| Phage- | H | D | — | — | — | D | G | — | — | — | I | I | — | S | 0.08 | 0.08 | 0.07 | 2602 |
| 841 | | | | | | | | | | | | | | | | | | |
| Phage- | F | D | — | — | — | — | L | — | — | T | I | I | — | P | 0.08 | 0.08 | 0.08 | 2603 |
| 842 | | | | | | | | | | | | | | | | | | |
| Phage- | — | D | — | — | S | D | R | G | — | N | A | A | — | H | 0.07 | 0.08 | 0.07 | 2604 |
| 843 | | | | | | | | | | | | | | | | | | |
| Phage- | N | I | — | L | A | Q | — | N | — | D | P | T | — | N | 0.07 | 0.08 | 0.08 | 2605 |
| 844 | | | | | | | | | | | | | | | | | | |
| Phage- | T | N | — | — | S | K | S | Q | V | — | D | H | — | I | 0.10 | 0.08 | 0.09 | 2606 |
| 845 | | | | | | | | | | | | | | | | | | |
| Phage- | N | H | — | H | — | Q | — | W | — | L | T | N | — | N | 0.09 | 0.07 | 0.07 | 2607 |
| 846 | | | | | | | | | | | | | | | | | | |
| Phage- | L | L | — | H | — | Q | G | — | L | Y | H | L | — | H | 0.09 | 0.07 | 0.08 | 2608 |
| 847 | | | | | | | | | | | | | | | | | | |
| Phage- | T | N | — | D | S | K | L | E | G | D | D | N | — | F | 0.09 | 0.07 | 0.07 | 2609 |
| 848 | | | | | | | | | | | | | | | | | | |
| Phage- | N | D | — | — | — | — | M | — | — | — | L | L | — | D | 0.08 | 0.07 | 0.07 | 2610 |
| 849 | | | | | | | | | | | | | | | | | | |
| Phage- | F | H | — | — | — | — | V | — | — | — | I | N | — | N | 0.07 | 0.07 | 0.07 | 2611 |
| 850 | | | | | | | | | | | | | | | | | | |
| Phage- | D | F | — | — | — | D | G | — | — | T | Y | V | — | S | 0.07 | 0.07 | 0.08 | 2612 |
| 851 | | | | | | | | | | | | | | | | | | |
| Phage- | — | S | — | — | — | Q | — | — | — | N | N | T | — | N | 0.07 | 0.07 | 0.08 | 2613 |
| 852 | | | | | | | | | | | | | | | | | | |
| Phage- | — | — | — | H | L | — | S | E | Q | F | D | I | — | I | 0.08 | 0.07 | 0.08 | 2614 |
| 853 | | | | | | | | | | | | | | | | | | |
| Phage- | D | D | — | — | — | — | W | E | F | V | F | F | — | D | 0.08 | 0.07 | 0.08 | 2615 |
| 854 | | | | | | | | | | | | | | | | | | |
| Phage- | Y | N | — | E | Q | Q | Q | — | — | D | P | S | — | I | 0.07 | 0.07 | 0.07 | 2616 |
| 855 | | | | | | | | | | | | | | | | | | |
| Phage- | N | T | — | — | T | — | Q | H | — | F | N | — | — | L | 0.08 | 0.07 | 0.08 | 2617 |
| 856 | | | | | | | | | | | | | | | | | | |
| Phage- | H | P | — | Q | — | G | — | E | — | V | D | Y | — | V | 0.08 | 0.07 | 0.08 | 2618 |
| 857 | | | | | | | | | | | | | | | | | | |
| Phage- | — | A | — | S | R | Q | L | G | — | D | A | Y | — | N | 0.07 | 0.07 | 0.07 | 2619 |
| 858 | | | | | | | | | | | | | | | | | | |
| Phage- | D | I | — | — | A | Q | E | V | H | V | Y | T | — | P | 0.07 | 0.07 | 0.07 | 2620 |
| 859 | | | | | | | | | | | | | | | | | | |
| Phage- | F | F | — | E | G | N | L | — | A | Y | L | L | — | L | 0.08 | 0.07 | 0.08 | 2621 |
| 860 | | | | | | | | | | | | | | | | | | |
| Phage- | Y | — | — | — | — | D | G | E | — | N | I | V | — | D | 0.07 | 0.07 | 0.07 | 2622 |
| 861 | | | | | | | | | | | | | | | | | | |

(—) indicates same amino acid as in CD3 scFv Peptide-B corresponding position (e.g. Phage-1 position).

TABLE 36
Sequences of those peptides selected for synthesis
(CD3 scFv Peptide-B Optimization)

| | | SEQ ID |
|---|---|---|
| Peptide-ID | Sequence | NO: |
| Peptide-AA | DDCWPDWEFDFACA | 229 |
| Peptide-AB | YICGLDFPDFLYCD | 230 |
| Peptide-AC | FDCWPDWEEYFVCD | 231 |
| Peptide-AD | YICWPDWEEYFDCD | 232 |
| Peptide-AE | NICWPDWEDDYFCF | 233 |
| Peptide-AF | NFCWPDWEYIYPCI | 234 |
| Peptide-AG | VDCWPDWEEDFLCI | 235 |
| Peptide-AH | HACWPDWEEYFPCN | 236 |
| Peptide-AI | YDCGPDVDESYVCV | 237 |
| Peptide-AJ | IDCWPDWEDDTFCY | 238 |
| Peptide-AK | YLCGPDGDETLACY | 239 |
| Peptide-AL | VDCGPDGDESILCY | 240 |

The application's sequence listing, which the Patent Office published only in electronic form, follows.

SEQUENCE LISTING (2622 sequences)

SEQ ID NO: 1 - protein, 8 aa, Artificial Sequence
  Description of Artificial Sequence: Synthetic peptide
GFTFNKYA

SEQ ID NO: 2 - protein, 10 aa, Artificial Sequence
  Description of Artificial Sequence: Synthetic peptide
IRSKYNNYAT

SEQ ID NO: 3 - protein, 16 aa, Artificial Sequence
  Description of Artificial Sequence: Synthetic peptide
VRHGNFGNSYISYWAY

SEQ ID NO: 4 - protein, 9 aa, Artificial Sequence
  Description of Artificial Sequence: Synthetic peptide
TGAVTSGNY

SEQ ID NO: 5 - protein, 3 aa, Artificial Sequence
  Description of Artificial Sequence: Synthetic peptide
GTK

SEQ ID NO: 6 - protein, 9 aa, Artificial Sequence
  Description of Artificial Sequence: Synthetic peptide
VLWYSNRWV

SEQ ID NO: 7 - protein, 8 aa, Artificial Sequence
  Description of Artificial Sequence: Synthetic peptide
GFTFNTYA

SEQ ID NO: 8 - protein, 10 aa, Artificial Sequence
  Description of Artificial Sequence: Synthetic peptide
IRSKYNNYAT

SEQ ID NO: 9 - protein, 16 aa, Artificial Sequence
  Description of Artificial Sequence: Synthetic peptide
VRHGNFGNSYVSWFAY

SEQ ID NO: 10 - protein, 9 aa, Artificial Sequence
  Description of Artificial Sequence: Synthetic peptide
TGAVTTSNY

SEQ ID NO: 11 - protein, 2 aa, Artificial Sequence
  Description of Artificial Sequence: Synthetic peptide
GT

SEQ ID NO: 12 - protein, 9 aa, Artificial Sequence
  Description of Artificial Sequence: Synthetic peptide
ALWYSNLWV

SEQ ID NO: 13 - protein, 249 aa, Artificial Sequence
  Description of Artificial Sequence: Synthetic polypeptide
EVQLVESGGGLVQPGGSLKLSCAASGFTFNKYAMNWVRQAPGKGLEWVARIRSKYNNYATYYADSVKDRFTISRDDSKNTAYLQMNNLKTEDTAVYYCVRHGNFGNSYISYWAYWGQGTLVTVSSGGGGSGGGGSGGGGSQTVVTQEPSLTVSPGGTVTLTCGSSTGAVTSGNYPNWVQQKPGQAPRGLIGGTKFLAPGTPARFSGSLLGGKAALTLSGVQPEDEAEYYCVLWYSNRWVFGGGTKLTVL

SEQ ID NO: 14 - protein, 249 aa, Artificial Sequence
  Description of Artificial Sequence: Synthetic polypeptide
QTVVTQEPSLTVSPGGTVTLTCRSSTGAVTTSNYANWVQQKPGQAPRGLIGGTNKRAPGTPARFSGSLLGGKAALTLSGVQPEDEAEYYCALWYSNLWVFGGGTKLTVLGGGGSGGGGSGGGGSEVQLVESGGGLVQPGGSLKLSCAASGFTFNTYAMNWVRQAPGKGLEWVARIRSKYNNYATYYADSVKDRFTISRDDSKNTAYLQMNNLKTEDTAVYYCVRHGNFGNSYVSWFAYWGQGTLVTVSS

SEQ ID NO: 15 - protein, 8 aa, Artificial Sequence
  Description of Artificial Sequence: Synthetic peptide
GYTFTNYG

SEQ ID NO: 16 - protein, 8 aa, Artificial Sequence
  Description of Artificial Sequence: Synthetic peptide
INTYTGEP

SEQ ID NO: 17 - protein, 14 aa, Artificial Sequence
  Description of Artificial Sequence: Synthetic peptide
ARGGFGSSYWYFDV

SEQ ID NO: 18 - protein, 6 aa, Artificial Sequence
  Description of Artificial Sequence: Synthetic peptide
QDVSIA

SEQ ID NO: 19 - protein, 3 aa, Artificial Sequence
  Description of Artificial Sequence: Synthetic peptide
SAS

SEQ ID NO: 20 - protein, 9 aa, Artificial Sequence
  Description of Artificial Sequence: Synthetic peptide
QQHYITPLT

SEQ ID NO: 21 - protein, 214 aa, Artificial Sequence
  Description of Artificial Sequence: Synthetic polypeptide
DIQLTQSPSSLSASVGDRVSITCKASQDVSIAVAWYQQKPGKAPKLLIYSASYRYTGVPDRFSGSGSGTDFTLTISSLQPEDFAVYYCQQHYITPLTFGAGTKVEIKRTVAAPSVFIFPPSDEQLKSGTASVVCLLNNFYPREAKVQWKVDNALQSGNSQESVTEQDSKDSTYSLSSTLTLSKADYEKHKVYACEVTHQGLSSPVTKSFNRGEC

SEQ ID NO: 22 - protein, 224 aa, Artificial Sequence
  Description of Artificial Sequence: Synthetic polypeptide
QVQLQQSGSELKKPGASVKVSCKASGYTFTNYGMNWVKQAPGQGLKWMGWINTYTGEPTYTDDFKGRFAFSLDTSVSTAYLQISSLKADDTAVYFCARGGFGSSYWYFDVWGQGSLVTVSSASTKGPSVFPLAPSSKSTSGGTAALGCLVKDYFPEPVTVSWNSGALTSGVHTFPAVLQSSGLYSLSSVVTVPSSSLGTQTYICNVNHKPSNTKVDKKVEPKSC

SEQ ID NO: 23 - protein, 14 aa, Artificial Sequence
  Description of Artificial Sequence: Synthetic peptide
SVLFCVKNLYCWVT

SEQ ID NO: 24 - protein, 14 aa, Artificial Sequence
  Description of Artificial Sequence: Synthetic peptide
VDFCKIYSWPVCHQ

SEQ ID NO: 25 - protein, 14 aa, Artificial Sequence
  Description of Artificial Sequence: Synthetic peptide
IDFCMLYNWPICAG

SEQ ID NO: 26 - protein, 14 aa, Artificial Sequence
  Description of Artificial Sequence: Synthetic peptide
GSQCLGPEWEVCPY

SEQ ID NO: 27 - protein, 14 aa, Artificial Sequence
  Description of Artificial Sequence: Synthetic peptide
VYCGPEFDESVGCM

SEQ ID NO: 28 - protein, 15 aa, Artificial Sequence
  Description of Artificial Sequence: Synthetic peptide
GGGGSGGGGSGGGGS

SEQ ID NO: 29 - protein, 5 aa, Artificial Sequence
  Description of Artificial Sequence: Synthetic peptide
GGGGS

SEQ ID NO: 30 - protein, 9 aa, Artificial Sequence
  Description of Artificial Sequence: Synthetic peptide
GGGGSGGGS

SEQ ID NO: 31 - protein, 28 aa, Artificial Sequence
  Description of Artificial Sequence: Synthetic peptide
GGGGSGGGLSGRSDAGSPLGLAGSGGGS

SEQ ID NO: 32 - protein, 26 aa, Artificial Sequence
  Description of Artificial Sequence: Synthetic peptide
GGGGSGGLSGRSDAGSPLGLAGSGGS

SEQ ID NO: 33 - protein, 18 aa, Artificial Sequence
  Description of Artificial Sequence: Synthetic peptide
GGGGSLSGRSDNHGSSGT

SEQ ID NO: 34 - protein, 26 aa, Artificial Sequence
  Description of Artificial Sequence: Synthetic peptide
GGGGSSGGSGGSGLSGRSDNHGSSGT

SEQ ID NO: 35 - protein, 8 aa, Artificial Sequence
  Description of Artificial Sequence: Synthetic peptide
ASGRSDNH

SEQ ID NO: 36 - protein, 8 aa, Artificial Sequence
  Description of Artificial Sequence: Synthetic peptide
LAGRSDNH

SEQ ID NO: 37 - protein, 13 aa, Artificial Sequence
  Description of Artificial Sequence: Synthetic peptide
ISSGLASGRSDNH

SEQ ID NO: 38 - protein, 13 aa, Artificial Sequence
  Description of Artificial Sequence: Synthetic peptide
ISSGLLAGRSDNH

SEQ ID NO: 39 - protein, 8 aa, Artificial Sequence
  Description of Artificial Sequence: Synthetic peptide
LSGRSDNH

SEQ ID NO: 40 - protein, 13 aa, Artificial Sequence
  Description of Artificial Sequence: Synthetic peptide
ISSGLLSGRSDNP

SEQ ID NO: 41 - protein, 13 aa, Artificial Sequence
  Description of Artificial Sequence: Synthetic peptide
ISSGLLSGRSDNH

SEQ ID NO: 42 - protein, 16 aa, Artificial Sequence
  Description of Artificial Sequence: Synthetic peptide
LSGRSDNHSPLGLAGS

SEQ ID NO: 43 - protein, 16 aa, Artificial Sequence
  Description of Artificial Sequence: Synthetic peptide
SPLGLAGSLSGRSDNH

SEQ ID NO: 44 - protein, 12 aa, Artificial Sequence
  Description of Artificial Sequence: Synthetic peptide
SPLGLSGRSDNH

SEQ ID NO: 45 - protein, 16 aa, Artificial Sequence
  Description of Artificial Sequence: Synthetic peptide
LAGRSDNHSPLGLAGS

SEQ ID NO: 46 - protein, 16 aa, Artificial Sequence
  Description of Artificial Sequence: Synthetic peptide
LSGRSDNHVPLSLKMG

SEQ ID NO: 47 - protein, 16 aa, Artificial Sequence
  Description of Artificial Sequence: Synthetic peptide
LSGRSDNHVPLSLSMG

SEQ ID NO: 48 - protein, 31 aa, Artificial Sequence
  Description of Artificial Sequence: Synthetic polypeptide
GSSGGSGGSGGSGISSGLLSGRSDNHGSSGT

SEQ ID NO: 49 - protein, 28 aa, Artificial Sequence
  Description of Artificial Sequence: Synthetic peptide
GSSGGSGGSGGISSGLLSGRSDNHGGGS

SEQ ID NO: 50 - protein, 8 aa, Artificial Sequence
  Description of Artificial Sequence: Synthetic peptide
ASGRSDNH

SEQ ID NO: 51 - protein, 8 aa, Artificial Sequence
  Description of Artificial Sequence: Synthetic peptide
LAGRSDNH

SEQ ID NO: 52 - protein, 13 aa, Artificial Sequence
  Description of Artificial Sequence: Synthetic peptide
ISSGLASGRSDNH

SEQ ID NO: 53 - protein, 8 aa, Artificial Sequence
  Description of Artificial Sequence: Synthetic peptide
LSGRSDAG

SEQ ID NO: 54 - protein, 13 aa, Artificial Sequence
  Description of Artificial Sequence: Synthetic peptide
ISSGLLSGRSDAG

SEQ ID NO: 55 - protein, 18 aa, Artificial Sequence
  Description of Artificial Sequence: Synthetic peptide
AAGLLAPPGGLSGRSDAG

SEQ ID NO: 56 - protein, 12 aa, Artificial Sequence
  Description of Artificial Sequence: Synthetic peptide
SPLGLSGRSDAG

SEQ ID NO: 57 - protein, 15 aa, Artificial Sequence
  Description of Artificial Sequence: Synthetic peptide
LSGRSDAGSPLGLAG

SEQ ID NO: 58 - protein, 31 aa, Artificial Sequence
  Description of Artificial Sequence: Synthetic polypeptide
GGGGSSGGSAAGLLAPPGGLSGRSDAGGGGS

SEQ ID NO: 59 - protein, 28 aa, Artificial Sequence
  Description of Artificial Sequence: Synthetic peptide
GSSGGSAAGLLAPPGGLSGRSDAGGGGS

SEQ ID NO: 60 - protein, 29 aa, Artificial Sequence
  Description of Artificial Sequence: Synthetic peptide
GGGGSGGGGGSGGGGSGGASSGAGGSGGS

SEQ ID NO: 61 - protein, 28 aa, Artificial Sequence
  Description of Artificial Sequence: Synthetic peptide
GGGGSGGGSGGGGSGGASSGAGGSGGGS

SEQ ID NO: 62 - protein, 5 aa, Artificial Sequence
  Description of Artificial Sequence: Synthetic peptide
GSGGS

SEQ ID NO: 63 - protein, 4 aa, Artificial Sequence
  Description of Artificial Sequence: Synthetic peptide
GGGS

SEQ ID NO: 64 - protein, 5 aa, Artificial Sequence
  Description of Artificial Sequence: Synthetic peptide
GGGGS

SEQ ID NO: 65 - protein, 6 aa, Artificial Sequence
  Description of Artificial Sequence: Synthetic peptide
GSSGGS

SEQ ID NO: 66 - protein, 8 aa, Artificial Sequence
  Description of Artificial Sequence: Synthetic peptide
GSTFYTAV

SEQ ID NO: 67 - protein, 8 aa, Artificial Sequence
  Description of Artificial Sequence: Synthetic peptide
IRWTALTT

SEQ ID NO: 68 - protein, 17 aa, Artificial Sequence
  Description of Artificial Sequence: Synthetic peptide
AARGTLGLFTTADSYDY

SEQ ID NO: 69 - protein, 124 aa, Artificial Sequence
  Description of Artificial Sequence: Synthetic polypeptide
EVQLVESGGGLVQPGGSLRLSCAASGSTFYTAVMGWVRQAPGKGLEWVAAIRWTALTTSYADSVKGRFTISRDGAKTTLYLQMNSLRPEDTAVYYCAARGTLGLFTTADSYDYWGQGTLVTVSS

SEQ ID NO: 70 - protein, 8 aa, Artificial Sequence
  Description of Artificial Sequence: Synthetic peptide
GFTFSKFG

SEQ ID NO: 71 - protein, 8 aa, Artificial Sequence
  Description of Artificial Sequence: Synthetic peptide
ISGSGRDT

SEQ ID NO: 72 - protein, 8 aa, Artificial Sequence
  Description of Artificial Sequence: Synthetic peptide
TIGGSLSV

SEQ ID NO: 73 - protein, 115 aa, Artificial Sequence
  Description of Artificial Sequence: Synthetic polypeptide
EVQLVESGGGLVQPGNSLRLSCAASGFTFSKFGMSWVRQAPGKGLEWVSSISGSGRDTLYADSVKGRFTISRDNAKTTLYLQMNSLRPEDTAVYYCTIGGSLSVSSQGTLVTVSS

SEQ ID NO: 74 - protein, 214 aa, Artificial Sequence; identical to SEQ ID NO: 21
  Description of Artificial Sequence: Synthetic polypeptide

SEQ ID NO: 75 - protein, 478 aa, Artificial Sequence
  Description of Artificial Sequence: Synthetic polypeptide
QTVVTQEPSLTVSPGGTVTLTCRSSTGAVTTSNYANWVQQKPGQAPRGLIGGTNKRAPGTPARFSGSLLGGKAALTLSGVQPEDEAEYYCALWYSNLWVFGGGTKLTVLGGGGSGGGGSGGGGSEVQLVESGGGLVQPGGSLKLSCAASGFTFNTYAMNWVRQAPGKGLEWVARIRSKYNNYATYYADSVKDRFTISRDDSKNTAYLQMNNLKTEDTAVYYCVRHGNFGNSYVSWFAYWGQGTLVTVSSGGGGSQVQLQQSGSELKKPGASVKVSCKASGYTFTNYGMNWVKQAPGQGLKWMGWINTYTGEPTYTDDFKGRFAFSLDTSVSTAYLQISSLKADDTAVYFCARGGFGSSYWYFDVWGQGSLVTVSSASTKGPSVFPLAPSSKSTSGGTAALGCLVKDYFPEPVTVSWNSGALTSGVHTFPAVLQSSGLYSLSSVVTVPSSSLGTQTYICNVNHKPSNTKVDKKVEPKSC

SEQ ID NO: 76 - protein, 468 aa, Artificial Sequence
  Description of Artificial Sequence: Synthetic polypeptide
QTVVTQEPSLTVSPGGTVTLTCRSSTGAVTTSNYANWVQQKPGQAPRGLIGGTNKRAPGTPARFSGSLLGGKAALTLSGVQPEDEAEYYCALWYSNLWVFGGGTKLTVLGGGGSGGGGSGGGGSEVQLVESGGGLVQPGGSLKLSCAASGFTFNTYAMNWVRQAPGKGLEWVARIRSKYNNYATYYADSVKDRFTISRDDSKNTAYLQMNNLKTEDTAVYYCVRHGNFGNSYVSWFAYWGQGTLVTVSSGGGGSDIQLTQSPSSLSASVGDRVSITCKASQDVSIAVAWYQQKPGKAPKLLIYSASYRYTGVPDRFSGSGSGTDFTLTISSLQPEDFAVYYCQQHYITPLTFGAGTKVEIKRTVAAPSVFIFPPSDEQLKSGTASVVCLLNNFYPREAKVQWKVDNALQSGNSQESVTEQDSKDSTYSLSSTLTLSKADYEKHKVYACEVTHQGLSSPVTKSFNRGEC

SEQ ID NO: 77 - protein, 224 aa, Artificial Sequence; identical to SEQ ID NO: 22
  Description of Artificial Sequence: Synthetic polypeptide

SEQ ID NO: 78 - protein, 214 aa, Artificial Sequence; identical to SEQ ID NO: 21
  Description of Artificial Sequence: Synthetic polypeptide

SEQ ID NO: 79 - protein, 478 aa, Artificial Sequence
  Description of Artificial Sequence: Synthetic polypeptide
EVQLVESGGGLVQPGGSLKLSCAASGFTFNKYAMNWVRQAPGKGLEWVARIRSKYNNYATYYADSVKDRFTISRDDSKNTAYLQMNNLKTEDTAVYYCVRHGNFGNSYISYWAYWGQGTLVTVSSGGGGSGGGGSGGGGSQTVVTQEPSLTVSPGGTVTLTCGSSTGAVTSGNYPNWVQQKPGQAPRGLIGGTKFLAPGTPARFSGSLLGGKAALTLSGVQPEDEAEYYCVLWYSNRWVFGGGTKLTVLGGGGSQVQLQQSGSELKKPGASVKVSCKASGYTFTNYGMNWVKQAPGQGLKWMGWINTYTGEPTYTDDFKGRFAFSLDTSVSTAYLQISSLKADDTAVYFCARGGFGSSYWYFDVWGQGSLVTVSSASTKGPSVFPLAPSSKSTSGGTAALGCLVKDYFPEPVTVSWNSGALTSGVHTFPAVLQSSGLYSLSSVVTVPSSSLGTQTYICNVNHKPSNTKVDKKVEPKSC

SEQ ID NO: 80 - protein, 468 aa, Artificial Sequence
  Description of Artificial Sequence: Synthetic polypeptide
EVQLVESGGGLVQPGGSLKLSCAASGFTFNKYAMNWVRQAPGKGLEWVARIRSKYNNYATYYADSVKDRFTISRDDSKNTAYLQMNNLKTEDTAVYYCVRHGNFGNSYISYWAYWGQGTLVTVSSGGGGSGGGGSGGGGSQTVVTQEPSLTVSPGGTVTLTCGSSTGAVTSGNYPNWVQQKPGQAPRGLIGGTKFLAPGTPARFSGSLLGGKAALTLSGVQPEDEAEYYCVLWYSNRWVFGGGTKLTVLGGGGSDIQLTQSPSSLSASVGDRVSITCKASQDVSIAVAWYQQKPGKAPKLLIYSASYRYTGVPDRFSGSGSGTDFTLTISSLQPEDFAVYYCQQHYITPLTFGAGTKVEIKRTVAAPSVFIFPPSDEQLKSGTASVVCLLNNFYPREAKVQWKVDNALQSGNSQESVTEQDSKDSTYSLSSTLTLSKADYEKHKVYACEVTHQGLSSPVTKSFNRGEC

SEQ ID NO: 81 - protein, 224 aa, Artificial Sequence; identical to SEQ ID NO: 22
  Description of Artificial Sequence: Synthetic polypeptide

SEQ ID NO: 82 - protein, 256 aa, Artificial Sequence
  Description of Artificial Sequence: Synthetic polypeptide
GGVDFCKIYSWPVCHQGGGGSGGLSGRSDAGSPLGLAGSGGSDIQLTQSPSSLSASVGDRVSITCKASQDVSIAVAWYQQKPGKAPKLLIYSASYRYTGVPDRFSGSGSGTDFTLTISSLQPEDFAVYYCQQHYITPLTFGAGTKVEIKRTVAAPSVFIFPPSDEQLKSGTASVVCLLNNFYPREAKVQWKVDNALQSGNSQESVTEQDSKDSTYSLSSTLTLSKADYEKHKVYACEVTHQGLSSPVTKSFNRGEC

SEQ ID NO: 83 - protein, 655 aa, Artificial Sequence
  Description of Artificial Sequence: Synthetic polypeptide
EVQLVESGGGLVQPGGSLRLSCAASGSTFYTAVMGWVRQAPGKGLEWVAAIRWTALTTSYADSVKGRFTISRDGAKTTLYLQMNSLRPEDTAVYYCAARGTLGLFTTADSYDYWGQGTLVTVSSGGGGSGGGSGGVYCGPEFDESVGCMGGGGSGGGLSGRSDAGSPLGLAGSGGGSEVQLVESGGGLVQPGGSLKLSCAASGFTFNKYAMNWVRQAPGKGLEWVARIRSKYNNYATYYADSVKDRFTISRDDSKNTAYLQMNNLKTEDTAVYYCVRHGNFGNSYISYWAYWGQGTLVTVSSGGGGSGGGGSGGGGSQTVVTQEPSLTVSPGGTVTLTCGSSTGAVTSGNYPNWVQQKPGQAPRGLIGGTKFLAPGTPARFSGSLLGGKAALTLSGVQPEDEAEYYCVLWYSNRWVFGGGTKLTVLGGGGSQVQLQQSGSELKKPGASVKVSCKASGYTFTNYGMNWVKQAPGQGLKWMGWINTYTGEPTYTDDFKGRFAFSLDTSVSTAYLQISSLKADDTAVYFCARGGFGSSYWYFDVWGQGSLVTVSSASTKGPSVFPLAPSSKSTSGGTAALGCLVKDYFPEPVTVSWNSGALTSGVHTFPAVLQSSGLYSLSSVVTVPSSSLGTQTYICNVNHKPSNTKVDKKVEPKSC

SEQ ID NO: 84 - protein, 256 aa, Artificial Sequence
  Description of Artificial Sequence: Synthetic polypeptide
GGSVLFCVKNLYCWVTGGGGSGGLSGRSDAGSPLGLAGSGGSDIQLTQSPSSLSASVGDRVSITCKASQDVSIAVAWYQQKPGKAPKLLIYSASYRYTGVPDRFSGSGSGTDFTLTISSLQPEDFAVYYCQQHYITPLTFGAGTKVEIKRTVAAPSVFIFPPSDEQLKSGTASVVCLLNNFYPREAKVQWKVDNALQSGNSQESVTEQDSKDSTYSLSSTLTLSKADYEKHKVYACEVTHQGLSSPVTKSFNRGEC

SEQ ID NO: 85 - protein, 655 aa, Artificial Sequence; identical to SEQ ID NO: 83
  Description of Artificial Sequence: Synthetic polypeptide

SEQ ID NO: 86 - protein, 645 aa, Artificial Sequence
  Description of Artificial Sequence: Synthetic polypeptide
EVQLVESGGGLVQPGGSLRLSCAASGSTFYTAVMGWVRQAPGKGLEWVAAIRWTALTTSYADSVKGRFTISRDGAKTTLYLQMNSLRPEDTAVYYCAARGTLGLFTTADSYDYWGQGTLVTVSSGGGGSGGGSGGVYCGPEFDESVGCMGGGGSGGGLSGRSDAGSPLGLAGSGGGSEVQLVESGGGLVQPGGSLKLSCAASGFTFNKYAMNWVRQAPGKGLEWVARIRSKYNNYATYYADSVKDRFTISRDDSKNTAYLQMNNLKTEDTAVYYCVRHGNFGNSYISYWAYWGQGTLVTVSSGGGGSGGGGSGGGGSQTVVTQEPSLTVSPGGTVTLTCGSSTGAVTSGNYPNWVQQKPGQAPRGLIGGTKFLAPGTPARFSGSLLGGKAALTLSGVQPEDEAEYYCVLWYSNRWVFGGGTKLTVLGGGGSDIQLTQSPSSLSASVGDRVSITCKASQDVSIAVAWYQQKPGKAPKLLIYSASYRYTGVPDRFSGSGSGTDFTLTISSLQPEDFAVYYCQQHYITPLTFGAGTKVEIKRTVAAPSVFIFPPSDEQLKSGTASVVCLLNNFYPREAKVQWKVDNALQSGNSQESVTEQDSKDSTYSLSSTLTLSKADYEKHKVYACEVTHQGLSSPVTKSFNRGEC

SEQ ID NO: 87 - protein, 266 aa, Artificial Sequence
  Description of Artificial Sequence: Synthetic polypeptide
GGVDFCKIYSWPVCHQGGGGSGGLSGRSDAGSPLGLAGSGGSQVQLQQSGSELKKPGASVKVSCKASGYTFTNYGMNWVKQAPGQGLKWMGWINTYTGEPTYTDDFKGRFAFSLDTSVSTAYLQISSLKADDTAVYFCARGGFGSSYWYFDVWGQGSLVTVSSASTKGPSVFPLAPSSKSTSGGTAALGCLVKDYFPEPVTVSWNSGALTSGVHTFPAVLQSSGLYSLSSVVTVPSSSLGTQTYICNVNHKPSNTKVDKKVEPKSC

SEQ ID NO: 88 - protein, 645 aa, Artificial Sequence; identical to SEQ ID NO: 86
  Description of Artificial Sequence: Synthetic polypeptide

SEQ ID NO: 89 - protein, 266 aa, Artificial Sequence
  Description of Artificial Sequence: Synthetic polypeptide
GGSVLFCVKNLYCWVTGGGGSGGLSGRSDAGSPLGLAGSGGSQVQLQQSGSELKKPGASVKVSCKASGYTFTNYGMNWVKQAPGQGLKWMGWINTYTGEPTYTDDFKGRFAFSLDTSVSTAYLQISSLKADDTAVYFCARGGFGSSYWYFDVWGQGSLVTVSSASTKGPSVFPLAPSSKSTSGGTAALGCLVKDYFPEPVTVSWNSGALTSGVHTFPAVLQSSGLYSLSSVVTVPSSSLGTQTYICNVNHKPSNTKVDKKVEPKSC

SEQ ID NO: 90 - protein, 256 aa, Artificial Sequence; identical to SEQ ID NO: 82
  Description of Artificial Sequence: Synthetic polypeptide

SEQ ID NO: 91 - protein, 655 aa, Artificial Sequence
  Description of Artificial Sequence: Synthetic polypeptide
EVQLVESGGGLVQPGGSLRLSCAASGSTFYTAVMGWVRQAPGKGLEWVAAIRWTALTTSYADSVKGRFTISRDGAKTTLYLQMNSLRPEDTAVYYCAARGTLGLFTTADSYDYWGQGTLVTVSSGGGGSGGGSGGGSQCLGPEWEVCPYGGGGSGGGLSGRSDAGSPLGLAGSGGGSEVQLVESGGGLVQPGGSLKLSCAASGFTFNKYAMNWVRQAPGKGLEWVARIRSKYNNYATYYADSVKDRFTISRDDSKNTAYLQMNNLKTEDTAVYYCVRHGNFGNSYISYWAYWGQGTLVTVSSGGGGSGGGGSGGGGSQTVVTQEPSLTVSPGGTVTLTCGSSTGAVTSGNYPNWVQQKPGQAPRGLIGGTKFLAPGTPARFSGSLLGGKAALTLSGVQPEDEAEYYCVLWYSNRWVFGGGTKLTVLGGGGSQVQLQQSGSELKKPGASVKVSCKASGYTFTNYGMNWVKQAPGQGLKWMGWINTYTGEPTYTDDFKGRFAFSLDTSVSTAYLQISSLKADDTAVYFCARGGFGSSYWYFDVWGQGSLVTVSSASTKGPSVFPLAPSSKSTSGGTAALGCLVKDYFPEPVTVSWNSGALTSGVHTFPAVLQSSGLYSLSSVVTVPSSSLGTQTYICNVNHKPSNTKVDKKVEPKSC

SEQ ID NO: 92 - protein, 645 aa, Artificial Sequence
  Description of Artificial Sequence: Synthetic polypeptide
EVQLVESGGGLVQPGGSLRLSCAASGSTFYTAVMGWVRQAPGKGLEWVAAIRWTALTTSYADSVKGRFTISRDGAKTTLYLQMNSLRPEDTAVYYCAARGTLGLFTTADSYDYWGQGTLVTVSSGGGGSGGGSGGGSQCLGPEWEVCPYGGGGSGGGLSGRSDAGSPLGLAGSGGGSEVQLVESGGGLVQPGGSLKLSCAASGFTFNKYAMNWVRQAPGKGLEWVARIRSKYNNYATYYADSVKDRFTISRDDSKNTAYLQMNNLKTEDTAVYYCVRHGNFGNSYISYWAYWGQGTLVTVSSGGGGSGGGGSGGGGSQTVVTQEPSLTVSPGGTVTLTCGSSTGAVTSGNYPNWVQQKPGQAPRGLIGGTKFLAPGTPARFSGSLLGGKAALTLSGVQPEDEAEYYCVLWYSNRWVFGGGTKLTVLGGGGSDIQLTQSPSSLSASVGDRVSITCKASQDVSIAVAWYQQKPGKAPKLLIYSASYRYTGVPDRFSGSGSGTDFTLTISSLQPEDFAVYYCQQHYITPLTFGAGTKVEIKRTVAAPSVFIFPPSDEQLKSGTASVVCLLNNFYPREAKVQWKVDNALQSGNSQESVTEQDSKDSTYSLSSTLTLSKADYEKHKVYACEVTHQGLSSPVTKSFNRGEC

SEQ ID NO: 93 - protein, 266 aa, Artificial Sequence; identical to SEQ ID NO: 87
  Description of Artificial Sequence: Synthetic polypeptide

SEQ ID NO: 94 - protein, 256 aa, Artificial Sequence; identical to SEQ ID NO: 84
  Description of Artificial Sequence: Synthetic polypeptide

SEQ ID NO: 95 - protein, 655 aa, Artificial Sequence; identical to SEQ ID NO: 91
  Description of Artificial Sequence: Synthetic polypeptide

SEQ ID NO: 96 - protein, 645 aa, Artificial Sequence; identical to SEQ ID NO: 92
  Description of Artificial Sequence: Synthetic polypeptide

SEQ ID NO: 97 - protein, 266 aa, Artificial Sequence; identical to SEQ ID NO: 89
  Description of Artificial Sequence: Synthetic polypeptide

SEQ ID NO: 98 - protein, 256 aa, Artificial Sequence; identical to SEQ ID NO: 82
  Description of Artificial Sequence: Synthetic polypeptide

SEQ ID NO: 99 - protein, 646 aa, Artificial Sequence
  Description of Artificial Sequence: Synthetic polypeptide
EVQLVESGGGLVQPGNSLRLSCAASGFTFSKFGMSWVRQAPGKGLEWVSSISGSGRDTLYADSVKGRFTISRDNAKTTLYLQMNSLRPEDTAVYYCTIGGSLSVSSQGTLVTVSSGGGGSGGGSGGVYCGPEFDESVGCMGGGGSGGGLSGRSDAGSPLGLAGSGGGSEVQLVESGGGLVQPGGSLKLSCAASGFTFNKYAMNWVRQAPGKGLEWVARIRSKYNNYATYYADSVKDRFTISRDDSKNTAYLQMNNLKTEDTAVYYCVRHGNFGNSYISYWAYWGQGTLVTVSSGGGGSGGGGSGGGGSQTVVTQEPSLTVSPGGTVTLTCGSSTGAVTSGNYPNWVQQKPGQAPRGLIGGTKFLAPGTPARFSGSLLGGKAALTLSGVQPEDEAEYYCVLWYSNRWVFGGGTKLTVLGGGGSQVQLQQSGSELKKPGASVKVSCKASGYTFTNYGMNWVKQAPGQGLKWMGWINTYTGEPTYTDDFKGRFAFSLDTSVSTAYLQISSLKADDTAVYFCARGGFGSSYWYFDVWGQGSLVTVSSASTKGPSVFPLAPSSKSTSGGTAALGCLVKDYFPEPVTVSWNSGALTSGVHTFPAVLQSSGLYSLSSVVTVPSSSLGTQTYICNVNHKPSNTKVDKKVEPKSC

SEQ ID NO: 100 - protein, 256 aa, Artificial Sequence; identical to SEQ ID NO: 84
  Description of Artificial Sequence: Synthetic polypeptide

SEQ ID NO: 101 - protein, 646 aa, Artificial Sequence; identical to SEQ ID NO: 99
  Description of Artificial Sequence: Synthetic polypeptide

SEQ ID NO: 102 - protein, 636 aa, Artificial Sequence
  Description of Artificial Sequence: Synthetic polypeptide
EVQLVESGGGLVQPGNSLRLSCAASGFTFSKFGMSWVRQAPGKGLEWVSSISGSGRDTLYADSVKGRFTISRDNAKTTLYLQMNSLRPEDTAVYYCTIGGSLSVSSQGTLVTVSSGGGGSGGGSGGVYCGPEFDESVGCMGGGGSGGGLSGRSDAGSPLGLAGSGGGSEVQLVESGGGLVQPGGSLKLSCAASGFTFNKYAMNWVRQAPGKGLEWVARIRSKYNNYATYYADSVKDRFTISRDDSKNTAYLQMNNLKTEDTAVYYCVRHGNFGNSYISYWAYWGQGTLVTVSSGGGGSGGGGSGGGGSQTVVTQEPSLTVSPGGTVTLTCGSSTGAVTSGNYPNWVQQKPGQAPRGLIGGTKFLAPGTPARFSGSLLGGKAALTLSGVQPEDEAEYYCVLWYSNRWVFGGGTKLTVLGGGGSDIQLTQSPSSLSASVGDRVSITCKASQDVSIAVAWYQQKPGKAPKLLIYSASYRYTGVPDRFSGSGSGTDFTLTISSLQPEDFAVYYCQQHYITPLTFGAGTKVEIKRTVAAPSVFIFPPSDEQLKSGTASVVCLLNNFYPREAKVQWKVDNALQSGNSQESVTEQDSKDSTYSLSSTLTLSKADYEKHKVYACEVTHQGLSSPVTKSFNRGEC

SEQ ID NO: 103 - protein, 266 aa, Artificial Sequence; identical to SEQ ID NO: 87
  Description of Artificial Sequence: Synthetic polypeptide

SEQ ID NO: 104 - protein, 636 aa, Artificial Sequence; identical to SEQ ID NO: 102
  Description of Artificial Sequence: Synthetic polypeptide

SEQ ID NO: 105 - protein, 266 aa, Artificial Sequence; identical to SEQ ID NO: 89
  Description of Artificial Sequence: Synthetic polypeptide

SEQ ID NO: 106 - protein, 261 aa, Artificial Sequence
  Description of Artificial Sequence: Synthetic polypeptide
GGIDFCMLYNWPICAGGGGGSSGGSAAGLLAPPGGLSGRSDAGGGGSDIQLTQSPSSLSASVGDRVSITCKASQDVSIAVAWYQQKPGKAPKLLIYSASYRYTGVPDRFSGSGSGTDFTLTISSLQPEDFAVYYCQQHYITPLTFGAGTKVEIKRTVAAPSVFIFPPSDEQLKSGTASVVCLLNNFYPREAKVQWKVDNALQSGNSQESVTEQDSKDSTYSLSSTLTLSKADYEKHKVYACEVTHQGLSSPVTKSFNRGEC

SEQ ID NO: 107 - protein, 646 aa, Artificial Sequence
  Description of Artificial Sequence: Synthetic polypeptide
EVQLVESGGGLVQPGNSLRLSCAASGFTFSKFGMSWVRQAPGKGLEWVSSISGSGRDTLYADSVKGRFTISRDNAKTTLYLQMNSLRPEDTAVYYCTIGGSLSVSSQGTLVTVSSGGGGSGGGSGGVYCGPEFDESVGCMGSSGGSAAGLLAPPGGLSGRSDAGGGGSEVQLVESGGGLVQPGGSLKLSCAASGFTFNKYAMNWVRQAPGKGLEWVARIRSKYNNYATYYADSVKDRFTISRDDSKNTAYLQMNNLKTEDTAVYYCVRHGNFGNSYISYWAYWGQGTLVTVSSGGGGSGGGGSGGGGSQTVVTQEPSLTVSPGGTVTLTCGSSTGAVTSGNYPNWVQQKPGQAPRGLIGGTKFLAPGTPARFSGSLLGGKAALTLSGVQPEDEAEYYCVLWYSNRWVFGGGTKLTVLGGGGSQVQLQQSGSELKKPGASVKVSCKASGYTFTNYGMNWVKQAPGQGLKWMGWINTYTGEPTYTDDFKGRFAFSLDTSVSTAYLQISSLKADDTAVYFCARGGFGSSYWYFDVWGQGSLVTVSSASTKGPSVFPLAPSSKSTSGGTAALGCLVKDYFPEPVTVSWNSGALTSGVHTFPAVLQSSGLYSLSSVVTVPSSSLGTQTYICNVNHKPSNTKVDKKVEPKSC

SEQ ID NO: 108 - protein, 261 aa, Artificial Sequence; identical to SEQ ID NO: 106
  Description of Artificial Sequence: Synthetic polypeptide

SEQ ID NO: 109 - protein, 655 aa, Artificial Sequence
  Description of Artificial Sequence: Synthetic polypeptide
EVQLVESGGGLVQPGGSLRLSCAASGSTFYTAVMGWVRQAPGKGLEWVAAIRWTALTTSYADSVKGRFTISRDGAKTTLYLQMNSLRPEDTAVYYCAARGTLGLFTTADSYDYWGQGTLVTVSSGGGGSGGGSGGVYCGPEFDESVGCMGSSGGSAAGLLAPPGGLSGRSDAGGGGSEVQLVESGGGLVQPGGSLKLSCAASGFTFNKYAMNWVRQAPGKGLEWVARIRSKYNNYATYYADSVKDRFTISRDDSKNTAYLQMNNLKTEDTAVYYCVRHGNFGNSYISYWAYWGQGTLVTVSSGGGGSGGGGSGGGGSQTVVTQEPSLTVSPGGTVTLTCGSSTGAVTSGNYPNWVQQKPGQAPRGLIGGTKFLAPGTPARFSGSLLGGKAALTLSGVQPEDEAEYYCVLWYSNRWVFGGGTKLTVLGGGGSQVQLQQSGSELKKPGASVKVSCKASGYTFTNYGMNWVKQAPGQGLKWMGWINTYTGEPTYTDDFKGRFAFSLDTSVSTAYLQISSLKADDTAVYFCARGGFGSSYWYFDVWGQGSLVTVSSASTKGPSVFPLAPSSKSTSGGTAALGCLVKDYFPEPVTVSWNSGALTSGVHTFPAVLQSSGLYSLSSVVTVPSSSLGTQTYICNVNHKPSNTKVDKKVEPKSC

SEQ ID NO: 110 - protein, 645 aa, Artificial Sequence
  Description of Artificial Sequence: Synthetic polypeptide
EVQLVESGGGLVQPGGSLRLSCAASGSTFYTAVMGWVRQAPGKGLEWVAAIRWTALTTSYADSVKGRFTISRDGAKTTLYLQMNSLRPEDTAVYYCAARGTLGLFTTADSYDYWGQGTLVTVSSGGGGSGGGSGGVYCGPEFDESVGCMGSSGGSAAGLLAPPGGLSGRSDAGGGGSEVQLVESGGGLVQPGGSLKLSCAASGFTFNKYAMNWVRQAPGKGLEWVARIRSKYNNYATYYADSVKDRFTISRDDSKNTAYLQMNNLKTEDTAVYYCVRHGNFGNSYISYWAYWGQGTLVTVSSGGGGSGGGGSGGGGSQTVVTQEPSLTVSPGGTVTLTCGSSTGAVTSGNYPNWVQQKPGQAPRGLIGGTKFLAPGTPARFSGSLLGGKAALTLSGVQPEDEAEYYCVLWYSNRWVFGGGTKLTVLGGGGSDIQLTQSPSSLSASVGDRVSITCKASQDVSIAVAWYQQKPGKAPKLLIYSASYRYTGVPDRFSGSGSGTDFTLTISSLQPEDFAVYYCQQHYITPLTFGAGTKVEIKRTVAAPSVFIFPPSDEQLKSGTASVVCLLNNFYPREAKVQWKVDNALQSGNSQESVTEQDSKDSTYSLSSTLTLSKADYEKHKVYACEVTHQGLSSPVTKSFNRGEC

SEQ ID NO: 111 - protein, 271 aa, Artificial Sequence
  Description of Artificial Sequence: Synthetic polypeptide
GGIDFCMLYNWPICAGGGGGSSGGSAAGLLAPPGGLSGRSDAGGGGSQVQLQQSGSELKKPGASVKVSCKASGYTFTNYGMNWVKQAPGQGLKWMGWINTYTGEPTYTDDFKGRFAFSLDTSVSTAYLQISSLKADDTAVYFCARGGFGSSYWYFDVWGQGSLVTVSSASTKGPSVFPLAPSSKSTSGGTAALGCLVKDYFPEPVTVSWNSGALTSGVHTFPAVLQSSGLYSLSSVVTVPSSSLGTQTYICNVNHKPSNTKVDKKVEPKSC

SEQ ID NO: 112 - protein, 636 aa, Artificial Sequence
  Description of Artificial Sequence: Synthetic polypeptide
EVQLVESGGGLVQPGNSLRLSCAASGFTFSKFGMSWVRQAPGKGLEWVSSISGSGRDTLYADSVKGRFTISRDNAKTTLYLQMNSLRPEDTAVYYCTIGGSLSVSSQGTLVTVSSGGGGSGGGSGGVYCGPEFDESVGCMGSSGGSAAGLLAPPGGLSGRSDAGGGGSEVQLVESGGGLVQPGGSLKLSCAASGFTFNKYAMNWVRQAPGKGLEWVARIRSKYNNYATYYADSVKDRFTISRDDSKNTAYLQMNNLKTEDTAVYYCVRHGNFGNSYISYWAYWGQGTLVTVSSGGGGSGGGGSGGGGSQTVVTQEPSLTVSPGGTVTLTCGSSTGAVTSGNYPNWVQQKPGQAPRGLIGGTKFLAPGTPARFSGSLLGGKAALTLSGVQPEDEAEYYCVLWYSNRWVFGGGTKLTVLGGGGSDIQLTQSPSSLSASVGDRVSITCKASQDVSIAVAWYQQKPGKAPKLLIYSASYRYTGVPDRFSGSGSGTDFTLTISSLQPEDFAVYYCQQHYITPLTFGAGTKVEIKRTVAAPSVFIFPPSDEQLKSGTASVVCLLNNFYPREAKVQWKVDNALQSGNSQESVTEQDSKDSTYSLSSTLTLSKADYEKHKVYACEVTHQGLSSPVTKSFNRGEC

SEQ ID NO: 113 - protein, 271 aa, Artificial Sequence; identical to SEQ ID NO: 111
  Description of Artificial Sequence: Synthetic polypeptide

SEQ ID NO: 114 - protein, 261 aa, Artificial Sequence
  Description of Artificial Sequence: Synthetic polypeptide
GGVDFCKIYSWPVCHQGGGGSSGGSAAGLLAPPGGLSGRSDAGGGGSDIQLTQSPSSLSASVGDRVSITCKASQDVSIAVAWYQQKPGKAPKLLIYSASYRYTGVPDRFSGSGSGTDFTLTISSLQPEDFAVYYCQQHYITPLTFGAGTKVEIKRTVAAPSVFIFPPSDEQLKSGTASVVCLLNNFYPREAKVQWKVDNALQSGNSQESVTEQDSKDSTYSLSSTLTLSKADYEKHKVYACEVTHQGLSSPVTKSFNRGEC

SEQ ID NO: 115 - protein, 655 aa, Artificial Sequence; identical to SEQ ID NO: 109
  Description of Artificial Sequence: Synthetic polypeptide

SEQ ID NO: 116 - protein, 256 aa, Artificial Sequence
  Description of Artificial Sequence: Synthetic polypeptide
GGIDFCMLYNWPICAGGGGGSGGLSGRSDAGSPLGLAGSGGSDIQLTQSPSSLSASVGDRVSITCKASQDVSIAVAWYQQKPGKAPKLLIYSASYRYTGVPDRFSGSGSGTDFTLTISSLQPEDFAVYYCQQHYITPLTFGAGTKVEIKRTVAAPSVFIFPPSDEQLKSGTASVVCLLNNFYPREAKVQWKVDNALQSGNSQESVTEQDSKDSTYSLSSTLTLSKADYEKHKVYACEVTHQGLSSPVTKSFNRGEC

SEQ ID NO: 117 - protein, 655 aa, Artificial Sequence; identical to SEQ ID NO: 83
  Description of Artificial Sequence: Synthetic polypeptide

SEQ ID NO: 118 - protein, 256 aa, Artificial Sequence; identical to SEQ ID NO: 116
  Description of Artificial Sequence: Synthetic polypeptide

SEQ ID NO: 119 - protein, 646 aa, Artificial Sequence; identical to SEQ ID NO: 99
  Description of Artificial Sequence: Synthetic polypeptide

SEQ ID NO: 120 - protein, 259 aa, Artificial Sequence
  Description of Artificial Sequence: Synthetic polypeptide
GGIDFCMLYNWPICAGGGGGSGGGGGSGGGGSGGASSGAGGSGGSDIQLTQSPSSLSASVGDRVSITCKASQDVSIAVAWYQQKPGKAPKLLIYSASYRYTGVPDRFSGSGSGTDFTLTISSLQPEDFAVYYCQQHYITPLTFGAGTKVEIKRTVAAPSVFIFPPSDEQLKSGTASVVCLLNNFYPREAKVQWKVDNALQSGNSQESVTEQDSKDSTYSLSSTLTLSKADYEKHKVYACEVTHQGLSSPVTKSFNRGEC

SEQ ID NO: 121 - protein, 646 aa, Artificial Sequence
  Description of Artificial Sequence: Synthetic polypeptide
EVQLVESGGGLVQPGNSLRLSCAASGFTFSKFGMSWVRQAPGKGLEWVSSISGSGRDTLYADSVKGRFTISRDNAKTTLYLQMNSLRPEDTAVYYCTIGGSLSVSSQGTLVTVSSGGGGSGGGSGGVYCGPEFDESVGCMGGGGSGGGSGGGGSGGASSGAGGSGGGSEVQLVESGGGLVQPGGSLKLSCAASGFTFNKYAMNWVRQAPGKGLEWVARIRSKYNNYATYYADSVKDRFTISRDDSKNTAYLQMNNLKTEDTAVYYCVRHGNFGNSYISYWAYWGQGTLVTVSSGGGGSGGGGSGGGGSQTVVTQEPSLTVSPGGTVTLTCGSSTGAVTSGNYPNWVQQKPGQAPRGLIGGTKFLAPGTPARFSGSLLGGKAALTLSGVQPEDEAEYYCVLWYSNRWVFGGGTKLTVLGGGGSQVQLQQSGSELKKPGASVKVSCKASGYTFTNYGMNWVKQAPGQGLKWMGWINTYTGEPTYTDDFKGRFAFSLDTSVSTAYLQISSLKADDTAVYFCARGGFGSSYWYFDVWGQGSLVTVSSASTKGPSVFPLAPSSKSTSGGTAALGCLVKDYFPEPVTVSWNSGALTSGVHTFPAVLQSSGLYSLSSVVTVPSSSLGTQTYICNVNHKPSNTKVDKKVEPKSC

SEQ ID NO: 122 - protein, 15 aa, Artificial Sequence
  Description of Artificial Sequence: Synthetic peptide
GYLWGCEWNCAGITT

SEQ ID NO: 123 - protein, 256 aa, Artificial Sequence
  Description of Artificial Sequence: Synthetic polypeptide
GGVDFCGLYHWPICYQGGGGSGGLSGRSDAGSPLGLAGSGGSDIQLTQSPSSLSASVGDRVSITCKASQDVSIAVAWYQQKPGKAPKLLIYSASYRYTGVPDRFSGSGSGTDFTLTISSLQPEDFAVYYCQQHYITPLTFGAGTKVEIKRTVAAPSVFIFPPSDEQLKSGTASVVCLLNNFYPREAKVQWKVDNALQSGNSQESVTEQDSKDSTYSLSSTLTLSKADYEKHKVYACEVTHQGLSSPVTKSFNRGEC

SEQ ID NO: 124 - protein, 655 aa, Artificial Sequence; identical to SEQ ID NO: 83
  Description of Artificial Sequence: Synthetic polypeptide

SEQ ID NO: 125 - protein, 600 aa, Artificial Sequence
  Description of Artificial Sequence: Synthetic polypeptide
EWVAAIRWTALTTSYADSVKGRFTISRDGAKTTLYLQMNSLRPEDTAVYYCAARGTLGLFTTADSYDYWGQGTLVTVSSGGGGSGGGSGGVYCGPEFDESVGCMGGGGSGGGLSGRSDAGSPLGLAGSGGGSEVQLVESGGGLVQPGGSLKLSCAASGFTFNKYAMNWVRQAPGKGLEWVARIRSKYNNYATYYADSVKDRFTISRDDSKNTAYLQMNNLKTEDTAVYYCVRHGNFGNSYISYWAYWGQGTLVTVSSGGGGSGGGGSGGGGSQTVVTQEPSLTVSPGGTVTLTCGSSTGAVTSGNYPNWVQQKPGQAPRGLIGGTKFLAPGTPARFSGSLLGGKAALTLSGVQPEDEAEYYCVLWYSNRWVFGGGTKLTVLGGGGSDIQLTQSPSSLSASVGDRVSITCKASQDVSIAVAWYQQKPGKAPKLLIYSASYRYTGVPDRFSGSGSGTDFTLTISSLQPEDFAVYYCQQHYITPLTFGAGTKVEIKRTVAAPSVFIFPPSDEQLKSGTASVVCLLNNFYPREAKVQWKVDNALQSGNSQESVTEQDSKDSTYSLSSTLTLSKADYEKHKVYACEVTHQGLSSPVTKSFNRGEC

SEQ ID NO: 126 - protein, 266 aa, Artificial Sequence
  Description of Artificial Sequence: Synthetic polypeptide
GGVDFCGLYHWPICYQGGGGSGGLSGRSDAGSPLGLAGSGGSQVQLQQSGSELKKPGASVKVSCKASGYTFTNYGMNWVKQAPGQGLKWMGWINTYTGEPTYTDDFKGRFAFSLDTSVSTAYLQISSLKADDTAVYFCARGGFGSSYWYFDVWGQGSLVTVSSASTKGPSVFPLAPSSKSTSGGTAALGCLVKDYFPEPVTVSWNSGALTSGVHTFPAVLQSSGLYSLSSVVTVPSSSLGTQTYICNVNHKPSNTKVDKKVEPKSC

SEQ ID NO: 127 - protein, 261 aa, Artificial Sequence
  Description of Artificial Sequence: Synthetic polypeptide
GGVDFCGLYHWPICYQGGGGSSGGSAAGLLAPPGGLSGRSDAGGGGSDIQLTQSPSSLSASVGDRVSITCKASQDVSIAVAWYQQKPGKAPKLLIYSASYRYTGVPDRFSGSGSGTDFTLTISSLQPEDFAVYYCQQHYITPLTFGAGTKVEIKRTVAAPSVFIFPPSDEQLKSGTASVVCLLNNFYPREAKVQWKVDNALQSGNSQESVTEQDSKDSTYSLSSTLTLSKADYEKHKVYACEVTHQGLSSPVTKSFNRGEC

SEQ ID NO: 128 - protein, 655 aa, Artificial Sequence; identical to SEQ ID NO: 109
  Description of Artificial Sequence: Synthetic polypeptide

SEQ ID NO: 129 - protein, 645 aa, Artificial Sequence; identical to SEQ ID NO: 110
  Description of Artificial Sequence: Synthetic polypeptide

SEQ ID NO: 130 - protein, 271 aa, Artificial Sequence
  Description of Artificial Sequence: Synthetic polypeptide
GGVDFCGLYHWPICYQGGGGSSGGSAAGLLAPPGGLSGRSDAGGGGSQVQLQQSGSELKKPGASVKVSCKASGYTFTNYGMNWVKQAPGQGLKWMGWINTYTGEPTYTDDFKGRFAFSLDTSVSTAYLQISSLKADDTAVYFCARGGFGSSYWYFDVWGQGSLVTVSSASTKGPSVFPLAPSSKSTSGGTAALGCLVKDYFPEPVTVSWNSGALTSGVHTFPAVLQSSGLYSLSSVVTVPSSSLGTQTYICNVNHKPSNTKVDKKVEPKSC

SEQ ID NO: 131 - protein, 646 aa, Artificial Sequence; identical to SEQ ID NO: 121
  Description of Artificial Sequence: Synthetic polypeptide

SEQ ID NO: 132 - protein, 636 aa, Artificial Sequence
  Description of Artificial Sequence: Synthetic polypeptide
EVQLVESGGGLVQPGNSLRLSCAASGFTFSKFGMSWVRQAPGKGLEWVSSISGSGRDTLYADSVKGRFTISRDNAKTTLYLQMNSLRPEDTAVYYCTIGGSLSVSSQGTLVTVSSGGGGSGGGSGGVYCGPEFDESVGCMGGGGSGGGSGGGGSGGASSGAGGSGGGSEVQLVESGGGLVQPGGSLKLSCAASGFTFNKYAMNWVRQAPGKGLEWVARIRSKYNNYATYYADSVKDRFTISRDDSKNTAYLQMNNLKTEDTAVYYCVRHGNFGNSYISYWAYWGQGTLVTVSSGGGGSGGGGSGGGGSQTVVTQEPSLTVSPGGTVTLTCGSSTGAVTSGNYPNWVQQKPGQAPRGLIGGTKFLAPGTPARFSGSLLGGKAALTLSGVQPEDEAEYYCVLWYSNRWVFGGGTKLTVLGGGGSDIQLTQSPSSLSASVGDRVSITCKASQDVSIAVAWYQQKPGKAPKLLIYSASYRYTGVPDRFSGSGSGTDFTLTISSLQPEDFAVYYCQQHYITPLTFGAGTKVEIKRTVAAPSVFIFPPSDEQLKSGTASVVCLLNNFYPREAKVQWKVDNALQSGNSQESVTEQDSKDSTYSLSSTLTLSKADYEKHKVYACEVTHQGLSSPVTKSFNRGEC

SEQ ID NO: 133 - protein, 14 aa, Artificial Sequence
  Description of Artificial Sequence: Synthetic peptide
AVLFCVKNLYCWVT

SEQ ID NO: 134 - protein, 14 aa, Artificial Sequence
  Description of Artificial Sequence: Synthetic peptide
SALFCVKNLYCWVT

SEQ ID NO: 135 - protein, 14 aa, Artificial Sequence
  Description of Artificial Sequence: Synthetic peptide
SVAFCVKNLYCWVT

SEQ ID NO: 136 - protein, 14 aa, Artificial Sequence
  Description of Artificial Sequence: Synthetic peptide
SVLACVKNLYCWVT

SEQ ID NO: 137 - protein, 14 aa, Artificial Sequence
  Description of Artificial Sequence: Synthetic peptide
SVLFCAKNLYCWVT

SEQ ID NO: 138 - protein, 14 aa, Artificial Sequence
  Description of Artificial Sequence: Synthetic peptide
SVLFCVANLYCWVT

SEQ ID NO: 139 - protein, 14 aa, Artificial Sequence
  Description of Artificial Sequence: Synthetic peptide
SVLFCVKALYCWVT

SEQ ID NO: 140 - protein, 14 aa, Artificial Sequence
  Description of Artificial Sequence: Synthetic peptide
SVLFCVKNAYCWVT

SEQ ID NO: 141 - protein, 14 aa, Artificial Sequence
  Description of Artificial Sequence: Synthetic peptide
SVLFCVKNLACWVT

SEQ ID NO: 142 - protein, 14 aa, Artificial Sequence
  Description of Artificial Sequence: Synthetic peptide
SVLFCVKNLYCAVT

SEQ ID NO: 143 - protein, 14 aa, Artificial Sequence
  Description of Artificial Sequence: Synthetic peptide
SVLFCVKNLYCWAT

SEQ ID NO: 144 - protein, 14 aa, Artificial Sequence
  Description of Artificial Sequence: Synthetic peptide
SVLFCVKNLYCWVA

SEQ ID NO: 145 - protein, 14 aa, Artificial Sequence
  Description of Artificial Sequence: Synthetic peptide
SVLFCVKNLYCWVT

SEQ ID NO: 146 - protein, 14 aa, Artificial Sequence
  Description of Artificial Sequence: Synthetic peptide
ADFCKIYSWPVCHQ

SEQ ID NO: 147 - protein, 14 aa, Artificial Sequence
  Description of Artificial Sequence: Synthetic peptide
VAFCKIYSWPVCHQ

SEQ ID NO: 148 - protein, 14 aa, Artificial Sequence
  Description of Artificial Sequence: Synthetic peptide
VDACKIYSWPVCHQ

SEQ ID NO: 149 - protein, 14 aa, Artificial Sequence
  Description of Artificial Sequence: Synthetic peptide
VDFCAIYSWPVCHQ

SEQ ID NO: 150 - protein, 14 aa, Artificial Sequence
  Description of Artificial Sequence: Synthetic peptide
VDFCKAYSWPVCHQ

SEQ ID NO: 151 - protein, 14 aa, Artificial Sequence
  Description of Artificial Sequence: Synthetic peptide
VDFCKIASWPVCHQ

SEQ ID NO: 152 - protein, 14 aa, Artificial Sequence
  Description of Artificial Sequence: Synthetic peptide
VDFCKIYAWPVCHQ

SEQ ID NO: 153 - protein, 14 aa, Artificial Sequence
  Description of Artificial Sequence: Synthetic peptide
VDFCKIYSAPVCHQ

SEQ ID NO: 154 - protein, 14 aa, Artificial Sequence
  Description of Artificial Sequence: Synthetic peptide
VDFCKIYSWAVCHQ

SEQ ID NO: 155 - protein, 14 aa, Artificial Sequence
  Description of Artificial Sequence: Synthetic peptide
VDFCKIYSWPACHQ

SEQ ID NO: 156 - protein, 14 aa, Artificial Sequence
  Description of Artificial Sequence: Synthetic peptide
VDFCKIYSWPVCAQ

SEQ ID NO: 157 - protein, 14 aa, Artificial Sequence
  Description of Artificial Sequence: Synthetic peptide
VDFCKIYSWPVCHA

SEQ ID NO: 158 - protein, 14 aa, Artificial Sequence
  Description of Artificial Sequence: Synthetic peptide
VDFCKIYSWPVCHQ

SEQ ID NO: 159 - protein, 14 aa, Artificial Sequence
  Description of Artificial Sequence: Synthetic peptide
DALICVKNLFCWTS

SEQ ID NO: 160 - protein, 14 aa, Artificial Sequence
  Description of Artificial Sequence: Synthetic peptide
DNLICVKNLWCWIA

SEQ ID NO: 161 - protein, 14 aa, Artificial Sequence
  Description of Artificial Sequence: Synthetic peptide
DTLFCVKNLYCWIV

SEQ ID NO: 162 - protein, 14 aa, Artificial Sequence
  Description of Artificial Sequence: Synthetic peptide
DTLSCFRNLYCWIT

SEQ ID NO: 163 - protein, 14 aa, Artificial Sequence
  Description of Artificial Sequence: Synthetic peptide
DTLWCVKNLYCWVA

SEQ ID NO: 164 - protein, 14 aa, Artificial Sequence
  Description of Artificial Sequence: Synthetic peptide
DVLFCVRNLYCWTS

SEQ ID NO: 165 - protein, 14 aa, Artificial Sequence
  Description of Artificial Sequence: Synthetic peptide
FDLLCVRNLYCWNV

SEQ ID NO: 166 - protein, 14 aa, Artificial Sequence
  Description of Artificial Sequence: Synthetic peptide
FSLVCVRNLYCWNV

SEQ ID NO: 167 - protein, 14 aa, Artificial Sequence
  Description of Artificial Sequence: Synthetic peptide
FTLFCVQNLYCWNV

SEQ ID NO: 168 - protein, 14 aa, Artificial Sequence
  Description of Artificial Sequence: Synthetic peptide
HDLQCFQNLFCWIV

SEQ ID NO: 169 - protein, 14 aa, Artificial Sequence
  Description of Artificial Sequence: Synthetic peptide
LSLFCVKNLYCWNV

SEQ ID NO: 170 - protein, 14 aa, Artificial Sequence
  Description of Artificial Sequence: Synthetic peptide
NYLLCVKNLYCWIV

SEQ ID NO: 171 - protein, 14 aa, Artificial Sequence
  Description of Artificial Sequence: Synthetic peptide
STLECVRNLYCWIS

SEQ ID NO: 172 - protein, 14 aa, Artificial Sequence
  Description of Artificial Sequence: Synthetic peptide
STLFCVKNLYCWVA

SEQ ID NO: 173 - protein, 14 aa, Artificial Sequence
  Description of Artificial Sequence: Synthetic peptide
STLFCVRNLYCWTV

SEQ ID NO: 174 - protein, 14 aa, Artificial Sequence
  Description of Artificial Sequence: Synthetic peptide
SYLVCVKNVYCWTA

SEQ ID NO: 175 - protein, 14 aa, Artificial Sequence
  Description of Artificial Sequence: Synthetic peptide
TALFCFKNVYCWNV

SEQ ID NO: 176 - protein, 14 aa, Artificial Sequence
  Description of Artificial Sequence: Synthetic peptide
TSLICFRNVYCWNV

SEQ ID NO: 177 - protein, 14 aa, Artificial Sequence
  Description of Artificial Sequence: Synthetic peptide
YDLVCLRNLFCWTA

SEQ ID NO: 178 - protein, 14 aa, Artificial Sequence
  Description of Artificial Sequence: Synthetic peptide
YSLVCVKNLYCWNL

SEQ ID NO: 179 - protein, 14 aa, Artificial Sequence
  Description of Artificial Sequence: Synthetic peptide
IDFCAMYQWPICDT

SEQ ID NO: 180 - protein, 14 aa, Artificial Sequence
  Description of Artificial Sequence: Synthetic peptide
IDFCAVYKWPVCQV

SEQ ID NO: 181 - protein, 14 aa, Artificial Sequence
  Description of Artificial Sequence: Synthetic peptide
IDFCMLYNWPICAG

SEQ ID NO: 182 - protein, 14 aa, Artificial Sequence
  Description of Artificial Sequence: Synthetic peptide
VDFCKIYAWPICGS

SEQ ID NO: 183 - protein, 14 aa, Artificial Sequence
  Description of Artificial Sequence: Synthetic peptide
VDFCKLYNWPVCQT

SEQ ID NO: 184 - protein, 14 aa, Artificial Sequence
  Description of Artificial Sequence: Synthetic peptide
IDFCLIYNWPVCDT

SEQ ID NO: 185 - protein, 14 aa, Artificial Sequence
  Description of Artificial Sequence: Synthetic peptide
EDFCKLYNWPICYQ

SEQ ID NO: 186 - protein, 14 aa, Artificial Sequence
  Description of Artificial Sequence: Synthetic peptide
VDFCGLYHWPICYQ

SEQ ID NO: 187 - protein, 14 aa, Artificial Sequence
  Description of Artificial Sequence: Synthetic peptide
VDFCYLYNWPVCSK

SEQ ID NO: 188 - protein, 14 aa, Artificial Sequence
  Description of Artificial Sequence: Synthetic peptide
IDFCAIYQWPVCRS

SEQ ID NO: 189 - protein, 14 aa, Artificial Sequence
  Description of Artificial Sequence: Synthetic peptide
VDFCALYNWPVCET

SEQ ID NO: 190 - protein, 14 aa, Artificial Sequence
  Description of Artificial Sequence: Synthetic peptide
PDFCAVYRWPICYQ

SEQ ID NO: 191 - protein, 14 aa, Artificial Sequence
  Description of Artificial Sequence: Synthetic peptide
VDFCELYRWPICNS

SEQ ID NO: 192 - protein, 14 aa, Artificial Sequence
  Description of Artificial Sequence: Synthetic peptide
LDFCKIYDWPICHL

SEQ ID NO: 193 - protein, 14 aa, Artificial Sequence
  Description of Artificial Sequence: Synthetic peptide
LDFCKLYQWPVCFT

SEQ ID NO: 194 - protein, 14 aa, Artificial Sequence
  Description of Artificial Sequence: Synthetic peptide
IDFCLLYDWPVCAS

SEQ ID NO: 195 - protein, 14 aa, Artificial Sequence
  Description of Artificial Sequence: Synthetic peptide
IDFCLLYDWPICGR

SEQ ID NO: 196 - protein, 14 aa, Artificial Sequence
  Description of Artificial Sequence: Synthetic peptide
MDFCQIYDWPICRL

SEQ ID NO: 197 - protein, 14 aa, Artificial Sequence
  Description of Artificial Sequence: Synthetic peptide
PDFCQLYNWPVCAG

SEQ ID NO: 198 - protein, 14 aa, Artificial Sequence
  Description of Artificial Sequence: Synthetic peptide
VDFCSFYRWPICET

SEQ ID NO: 199 - protein, 14 aa, Artificial Sequence
  Description of Artificial Sequence: Synthetic peptide
IDFCSLYQWPVCGT

SEQ ID NO: 200 - protein, 14 aa, Artificial Sequence
  Description of Artificial Sequence: Synthetic peptide
VDFCTIYKWPVCEG

SEQ ID NO: 201 - protein, 14 aa, Artificial Sequence
  Description of Artificial Sequence: Synthetic peptide
VDFCYQYGWPICSR

SEQ ID NO: 202 - protein, 14 aa, Artificial Sequence
  Description of Artificial Sequence: Synthetic peptide
GSQCLGPEWEVCPY

SEQ ID NO: 203 - protein, 14 aa, Artificial Sequence
  Description of Artificial Sequence: Synthetic peptide
ASQCLGPEWEVCPY

SEQ ID NO: 204 - protein, 14 aa, Artificial Sequence
  Description of Artificial Sequence: Synthetic peptide
GAQCLGPEWEVCPY

SEQ ID NO: 205 - protein, 14 aa, Artificial Sequence
  Description of Artificial Sequence: Synthetic peptide
GSACLGPEWEVCPY

SEQ ID NO: 206 - protein, 14 aa, Artificial Sequence
  Description of Artificial Sequence: Synthetic peptide
GSQCAGPEWEVCPY

SEQ ID NO: 207 - protein, 14 aa, Artificial Sequence
  Description of Artificial Sequence: Synthetic peptide
GSQCLAPEWEVCPY

SEQ ID NO: 208 - protein, 14 aa, Artificial Sequence
  Description of Artificial Sequence: Synthetic peptide
GSQCLGAEWEVCPY

SEQ ID NO: 209 - protein, 14 aa, Artificial Sequence
  Description of Artificial Sequence: Synthetic peptide
GSQCLGPAWEVCPY

SEQ ID NO: 210 - protein, 14 aa, Artificial Sequence
  Description of Artificial Sequence: Synthetic peptide
GSQCLGPEAEVCPY

SEQ ID NO: 211 - protein, 14 aa, Artificial Sequence
  Description of Artificial Sequence: Synthetic peptide
GSQCLGPEWAVCPY

SEQ ID NO: 212 - protein, 14 aa, Artificial Sequence
  Description of Artificial Sequence: Synthetic peptide
GSQCLGPEWEACPY

SEQ ID NO: 213 - protein, 14 aa, Artificial Sequence
  Description of Artificial Sequence: Synthetic peptide
GSQCLGPEWEVCAY

SEQ ID NO: 214 - protein, 14 aa, Artificial Sequence
  Description of Artificial Sequence: Synthetic peptide
GSQCLGPEWEVCPA

SEQ ID NO: 215 - protein, 14 aa, Artificial Sequence
  Description of Artificial Sequence: Synthetic peptide
GSQCLGPEWEVCPY

SEQ ID NO: 216 - protein, 14 aa, Artificial Sequence
  Description of Artificial Sequence: Synthetic peptide
VYCGPEFDESVGCM

SEQ ID NO: 217 - protein, 14 aa, Artificial Sequence
  Description of Artificial Sequence: Synthetic peptide
AYCGPEFDESVGCM

SEQ ID NO: 218 - protein, 14 aa, Artificial Sequence
  Description of Artificial Sequence: Synthetic peptide
VACGPEFDESVGCM

SEQ ID NO: 219 - protein, 14 aa, Artificial Sequence
  Description of Artificial Sequence: Synthetic peptide
VYCAPEFDESVGCM

SEQ ID NO: 220 - protein, 14 aa, Artificial Sequence
  Description of Artificial Sequence: Synthetic peptide
VYCGAEFDESVGCM

SEQ ID NO: 221 - protein, 14 aa, Artificial Sequence
  Description of Artificial Sequence: Synthetic peptide
VYCGPAFDESVGCM

SEQ ID NO: 222 - protein, 14 aa, Artificial Sequence
  Description of Artificial Sequence: Synthetic peptide
VYCGPEADESVGCM

SEQ ID NO: 223 - protein, 14 aa, Artificial Sequence
  Description of Artificial Sequence: Synthetic peptide
VYCGPEFAESVGCM

SEQ ID NO: 224 - protein, 14 aa, Artificial Sequence
  Description of Artificial Sequence: Synthetic peptide
VYCGPEFDASVGCM

SEQ ID NO: 225 - protein, 14 aa, Artificial Sequence
  Description of Artificial Sequence: Synthetic peptide
VYCGPEFDEAVGCM

SEQ ID NO: 226 - protein, 14 aa, Artificial Sequence
  Description of Artificial Sequence: Synthetic peptide
VYCGPEFDESAGCM

SEQ ID NO: 227 - protein, 14 aa, Artificial Sequence
  Description of Artificial Sequence: Synthetic peptide
VYCGPEFDESVACM

SEQ ID NO: 228 - protein, 14 aa, Artificial Sequence
  Description of Artificial Sequence: Synthetic peptide
VYCGPEFDESVGCA

SEQ ID NO: 229 - protein, 14 aa, Artificial Sequence
  Description of Artificial Sequence: Synthetic peptide
DDCWPDWEFDFACA

SEQ ID NO: 230 - protein, 14 aa, Artificial Sequence
  Description of Artificial Sequence: Synthetic peptide
YICGLDFPDFLYCD

SEQ ID NO: 231 - protein, 14 aa, Artificial Sequence
  Description of Artificial Sequence: Synthetic peptide
FDCWPDWEEYFVCD

SEQ ID NO: 232 - protein, 14 aa, Artificial Sequence
  Description of Artificial Sequence: Synthetic peptide
YICWPDWEEYFDCD

SEQ ID NO: 233 - protein, 14 aa, Artificial Sequence
  Description of Artificial Sequence: Synthetic peptide
NICWPDWEDDYFCF

SEQ ID NO: 234 - protein, 14 aa, Artificial Sequence
  Description of Artificial Sequence: Synthetic peptide
NFCWPDWEYIYPCI

SEQ ID NO: 235 - protein, 14 aa, Artificial Sequence
  Description of Artificial Sequence: Synthetic peptide
VDCWPDWEEDFLCI

SEQ ID NO: 236 - protein, 14 aa, Artificial Sequence
  Description of Artificial Sequence: Synthetic peptide
HACWPDWEEYFPCN

SEQ ID NO: 237 - protein, 14 aa, Artificial Sequence
  Description of Artificial Sequence: Synthetic peptide
YDCGPDVDESYVCV

SEQ ID NO: 238 - protein, 14 aa, Artificial Sequence
  Description of Artificial Sequence: Synthetic peptide
IDCWPDWEDDTFCY

SEQ ID NO: 239 - protein, 14 aa, Artificial Sequence
  Description of Artificial Sequence: Synthetic peptide
YLCGPDGDETLACY

SEQ ID NO: 240 - protein, 14 aa, Artificial Sequence
  Description of Artificial Sequence: Synthetic peptide
VDCGPDGDESILCY

SEQ ID NO: 241 - protein, 256 aa, Artificial Sequence
  Description of Artificial Sequence: Synthetic polypeptide
GGVDFCGLYHWPICYQGGGGSGGGGGSGGGGSGGASSGAGGSDIQLTQSPSSLSASVGDRVSITCKASQDVSIAVAWYQQKPGKAPKLLIYSASYRYTGVPDRFSGSGSGTDFTLTISSLQPEDFAVYYCQQHYITPLTFGAGTKVEIKRTVAAPSVFIFPPSDEQLKSGTASVVCLLNNFYPREAKVQWKVDNALQSGNSQESVTEQDSKDSTYSLSSTLTLSKADYEKHKVYACEVTHQGLSSPVTKSFNRGEC

SEQ ID NO: 242 - protein, 266 aa, Artificial Sequence
  Description of Artificial Sequence: Synthetic polypeptide
GGVDFCGLYHWPICYQGGGGSGGGGGSGGGGSGGASSGAGGSQVQLQQSGSELKKPGASVKVSCKASGYTFTNYGMNWVKQAPGQGLKWMGWINTYTGEPTYTDDFKGRFAFSLDTSVSTAYLQISSLKADDTAVYFCARGGFGSSYWYFDVWGQGSLVTVSSASTKGPSVFPLAPSSKSTSGGTAALGCLVKDYFPEPVTVSWNSGALTSGVHTFPAVLQSSGLYSLSSVVTVPSSSLGTQTYICNVNHKPSNTKVDKKVEPKSC

SEQ ID NO: 243 - protein, 9 aa, Artificial Sequence
  Description of Artificial Sequence: Synthetic peptide
  SITE (1)..(9): This sequence may encompass 1-3 "Gly Gly Ser" repeating units
GGSGGSGGS

SEQ ID NO: 244 - protein, 14 aa, Artificial Sequence
  Description of Artificial Sequence: Synthetic peptide
ATLFCVRNLYCWTA

SEQ ID NO: 245 - protein, 14 aa, Artificial Sequence
  Description of Artificial Sequence: Synthetic peptide
FSLLCVRNLYCWNV

SEQ ID NO: 246 - protein, 14 aa, Artificial Sequence
  Description of Artificial Sequence: Synthetic peptide
NALVCVRNLYCWIY

SEQ ID NO: 247 - protein, 14 aa, Artificial Sequence
  Description of Artificial Sequence: Synthetic peptide
TSLWCVRNLYCYNV

SEQ ID NO: 248 - protein, 14 aa, Artificial Sequence
  Description of Artificial Sequence: Synthetic peptide
YTLYCVQNVYCWTL

SEQ ID NO: 249 - protein, 14 aa, Artificial Sequence
  Description of Artificial Sequence: Synthetic peptide
DTLFCVKNLYCWIN

SEQ ID NO: 250 - protein, 14 aa, Artificial Sequence
  Description of Artificial Sequence: Synthetic peptide
YSLVCVNNLYCWNT

SEQ ID NO: 251 - protein, 14 aa, Artificial Sequence
  Description of Artificial Sequence: Synthetic peptide
TDLVCVMNRWCWHY

SEQ ID NO: 252 - protein, 14 aa, Artificial Sequence
  Description of Artificial Sequence: Synthetic peptide
NTLFCVQNLYCWIH

SEQ ID NO: 253 - protein, 14 aa, Artificial Sequence
  Description of Artificial Sequence: Synthetic peptide
NTLFCVRNLYCWIN

SEQ ID NO: 254 - protein, 14 aa, Artificial Sequence
  Description of Artificial Sequence: Synthetic peptide
TDLLCFQNIYCWHT

SEQ ID NO: 255 - protein, 14 aa, Artificial Sequence
  Description of Artificial Sequence: Synthetic peptide
NSLFCLHNLVCWID

SEQ ID NO: 256 - protein, 14 aa, Artificial Sequence
  Description of Artificial Sequence: Synthetic peptide
NTLVCVQNVYCWIN

SEQ ID NO: 257 - protein, 14 aa, Artificial Sequence
  Description of Artificial Sequence: Synthetic peptide
NSLFCFQNLLCWTD

SEQ ID NO: 258 - protein, 14 aa, Artificial Sequence
  Description of Artificial Sequence: Synthetic peptide
NHLICVKNLWCWIN

SEQ ID NO: 259 - protein, 14 aa, Artificial Sequence
  Description of Artificial Sequence: Synthetic peptide
SDLFCLKNIYCWHV

SEQ ID NO: 260 - protein, 14 aa, Artificial Sequence
  Description of Artificial Sequence: Synthetic peptide
NILVCVNNIYCWID

SEQ ID NO: 261 - protein, 14 aa, Artificial Sequence
  Description of Artificial Sequence: Synthetic peptide
NTLWCVKNLYCWID

SEQ ID NO: 262 - protein, 14 aa, Artificial Sequence
  Description of Artificial Sequence: Synthetic peptide
DTLFCVKNLFCWTH

SEQ ID NO: 263 - protein, 14 aa, Artificial Sequence
  Description of Artificial Sequence: Synthetic peptide
ATLFCFQNLYCWNI

SEQ ID NO: 264 - protein, 14 aa, Artificial Sequence
  Description of Artificial Sequence: Synthetic peptide
YALFCVNNIYCWIS

SEQ ID NO: 265 - protein, 14 aa, Artificial Sequence
  Description of Artificial Sequence: Synthetic peptide
SDLFCVRNLYCWNS

SEQ ID NO: 266 - protein, 14 aa, Artificial Sequence
  Description of Artificial Sequence: Synthetic peptide
DVLICVKNLYCWIH

SEQ ID NO: 267 - protein, 14 aa, Artificial Sequence
  Description of Artificial Sequence: Synthetic peptide
NTLLCFRNLYCWVD

SEQ ID NO: 268 - protein, 14 aa, Artificial Sequence
  Description of Artificial Sequence: Synthetic peptide
SHLMCVRNLYCWIS

SEQ ID NO: 269 - protein, 14 aa, Artificial Sequence
  Description of Artificial Sequence: Synthetic peptide
DHLVCVKNLYCWID

SEQ ID NO: 270 - protein, 14 aa, Artificial Sequence
  Description of Artificial Sequence: Synthetic peptide
NSLFCVKNLYCWVD

SEQ ID NO: 271 - protein, 14 aa, Artificial Sequence
  Description of Artificial Sequence: Synthetic peptide
ASLFCVQNLWCWTS

SEQ ID NO: 272 - protein, 14 aa, Artificial Sequence
  Description of Artificial Sequence: Synthetic peptide
ASLFCFQNLYCWNY

SEQ ID NO: 273 - protein, 14 aa, Artificial Sequence
  Description of Artificial Sequence: Synthetic peptide
LSLFCVHNIYCWTD

SEQ ID NO: 274 - protein, 14 aa, Artificial Sequence
  Description of Artificial Sequence: Synthetic peptide
TTLYCFQNLYCWSV

SEQ ID NO: 275 - protein, 14 aa, Artificial Sequence
  Description of Artificial Sequence: Synthetic peptide
PALVCVRNLYCWIV

SEQ ID NO: 276 - protein, 14 aa, Artificial Sequence
  Description of Artificial Sequence: Synthetic peptide
NSLFCVQNLYCWII

SEQ ID NO: 277 - protein, 14 aa, Artificial Sequence
  Description of Artificial Sequence: Synthetic peptide
ASLLCVKNLYCWID

SEQ ID NO: 278 - protein, 14 aa, Artificial Sequence
  Description of Artificial Sequence: Synthetic peptide
NSLFCLKNLYCWID

SEQ ID NO: 279 - protein, 14 aa, Artificial Sequence
  Description of Artificial Sequence: Synthetic peptide
NSLLCVKNLWCWID

SEQ ID NO: 280 - protein, 14 aa, Artificial Sequence
  Description of Artificial Sequence: Synthetic peptide
SDLFCWRNLFCWHI

SEQ ID NO: 281 - protein, 14 aa, Artificial Sequence
  Description of Artificial Sequence: Synthetic peptide
NNLVCVKNLWCWVD

SEQ ID NO: 282 - protein, 14 aa, Artificial Sequence
  Description of Artificial Sequence: Synthetic peptide
YHLMCVRNLYCWVV

SEQ ID NO: 283 - protein, 14 aa, Artificial Sequence
  Description of Artificial Sequence: Synthetic peptide
SSLVCVRNLYCWID

SEQ ID NO: 284 - protein, 14 aa, Artificial Sequence
  Description of Artificial Sequence: Synthetic peptide
TTLLCVKNLYCWHS

SEQ ID NO: 285 - protein, 14 aa, Artificial Sequence
  Description of Artificial Sequence: Synthetic peptide
TSLFCFQNVYCWID

SEQ ID NO: 286 - protein, 14 aa, Artificial Sequence
  Description of Artificial Sequence: Synthetic peptide
TSLICVRNILCWHS

SEQ ID NO: 287 - protein, 14 aa, Artificial Sequence
  Description of Artificial Sequence: Synthetic peptide
DVLLCFRNLWCWHT

SEQ ID NO: 288 - protein, 14 aa, Artificial Sequence
  Description of Artificial Sequence: Synthetic peptide
TDLICVMNLYCWHT

SEQ ID NO: 289 - protein, 14 aa, Artificial Sequence
  Description of Artificial Sequence: Synthetic peptide
LDLICVRNLYCWIN

SEQ ID NO: 290 - protein, 14 aa, Artificial Sequence
  Description of Artificial Sequence: Synthetic peptide
NYLVCEKNLYCRID

SEQ ID NO: 291 - protein, 14 aa, Artificial Sequence
  Description of Artificial Sequence: Synthetic peptide
NTLICVRNLYCWVI

SEQ ID NO: 292 - protein, 14 aa, Artificial Sequence
  Description of Artificial Sequence: Synthetic peptide
NALLCWQNIYCWID

SEQ ID NO: 293 - protein, 14 aa, Artificial Sequence
  Description of Artificial Sequence: Synthetic peptide
NTLLCVNNLWCWID

SEQ ID NO: 294 - protein, 14 aa, Artificial Sequence
  Description of Artificial Sequence: Synthetic peptide
LSLFCVKNLYCWNA

SEQ ID NO: 295 - protein, 14 aa, Artificial Sequence
  Description of Artificial Sequence: Synthetic peptide
NNLYCFQNLYCWID

SEQ ID NO: 296 - protein, 14 aa, Artificial Sequence
  Description of Artificial Sequence: Synthetic peptide
LALFCVKNIYCWTS

SEQ ID NO: 297 - protein, 14 aa, Artificial Sequence
  Description of Artificial Sequence: Synthetic peptide
THLVCVYNVYCWHA

SEQ ID NO: 298 - protein, 14 aa, Artificial Sequence
  Description of Artificial Sequence: Synthetic peptide
NTLICLNNLWCWID

SEQ ID NO: 299 - protein, 14 aa, Artificial Sequence
  Description of Artificial Sequence: Synthetic peptide
NNLLCVRNLYCWID

SEQ ID NO: 300 - protein, 14 aa, Artificial Sequence
  Description of Artificial Sequence: Synthetic peptide
NTLVCVNNLFCWIN

SEQ ID NO: 301 - protein, 14 aa, Artificial Sequence
  Description of Artificial Sequence: Synthetic peptide
TSLMCVKNLFCWHT

SEQ ID NO: 302 - protein, 14 aa, Artificial Sequence
  Description of Artificial Sequence: Synthetic peptide
SSFSCWHNLYCWDV

SEQ ID NO: 303 - protein, 14 aa, Artificial Sequence
  Description of Artificial Sequence: Synthetic peptide
DALFCVRNLYCWID

SEQ ID NO: 304 - protein, 14 aa, Artificial Sequence
  Description of Artificial Sequence: Synthetic peptide
VDLVCIRNLYCWND

SEQ ID NO: 305 - protein, 14 aa, Artificial Sequence
  Description of Artificial Sequence: Synthetic peptide
STLFCVKNLYCWTN

SEQ ID NO: 306 - protein, 14 aa, Artificial Sequence
  Description of Artificial Sequence: Synthetic peptide
ANLVCVQNLYCWIT

SEQ ID NO: 307 - protein, 14 aa, Artificial Sequence
  Description of Artificial Sequence: Synthetic peptide
AALFCVKNLYCWID

SEQ ID NO: 308 - protein, 14 aa, Artificial Sequence
  Description of Artificial Sequence: Synthetic peptide
SSLFCVKNLYCWVD

SEQ ID NO: 309 - protein, 14 aa, Artificial Sequence
  Description of Artificial Sequence: Synthetic peptide
HDLVCFKNLWCWND

SEQ ID NO: 310 - protein, 14 aa, Artificial Sequence
  Description of Artificial Sequence: Synthetic peptide
NHLLCLNNLYCWID

SEQ ID NO: 311 - protein, 14 aa, Artificial Sequence
  Description of Artificial Sequence: Synthetic peptide
YDLVCVRNLYCWHD

SEQ ID NO: 312 - protein, 14 aa, Artificial Sequence
  Description of Artificial Sequence: Synthetic peptide
SSLVCVNNLYCWNT

SEQ ID NO: 313 - protein, 14 aa, Artificial Sequence
  Description of Artificial Sequence: Synthetic peptide
SDLFCVMNLYCWHY

SEQ ID NO: 314 - protein, 14 aa, Artificial Sequence
  Description of Artificial Sequence: Synthetic peptide
DSLLCFQNLWCWIV

SEQ ID NO: 315 - protein, 14 aa, Artificial Sequence
  Description of Artificial Sequence: Synthetic peptide
NHLLCVRNLYCWVT

SEQ ID NO: 316 - protein, 14 aa, Artificial Sequence
  Description of Artificial Sequence: Synthetic peptide
ADLFCVKNLWCWHS

SEQ ID NO: 317 - protein, 14 aa, Artificial Sequence
  Description of Artificial Sequence: Synthetic peptide
NALFCFNNLYCWID

SEQ ID NO: 318 - protein, 14 aa, Artificial Sequence
  Description of Artificial Sequence: Synthetic peptide
NSLFCVQNVYCWNT

SEQ ID NO: 319 - protein, 14 aa, Artificial Sequence
  Description of Artificial Sequence: Synthetic peptide
TNLMCVRNLYCWND

SEQ ID NO: 320 - protein, 14 aa, Artificial Sequence
  Description of Artificial Sequence: Synthetic peptide
IHLICVENIYCWHV

SEQ ID NO: 321 - protein, 14 aa, Artificial Sequence
  Description of Artificial Sequence: Synthetic peptide
ADLLCVRNLYCWHD

SEQ ID NO: 322 - protein, 14 aa, Artificial Sequence
  Description of Artificial Sequence: Synthetic peptide
HSLFCVKNLYCWHT

SEQ ID NO: 323 - protein, 14 aa, Artificial Sequence
  Description of Artificial Sequence: Synthetic peptide
SVLFCVRNLYCWTD

SEQ ID NO: 324 - protein, 14 aa, Artificial Sequence
  Description of Artificial Sequence: Synthetic peptide
TNLFCVRNLYCWTD

SEQ ID NO: 325 - protein, 14 aa, Artificial Sequence
  Description of Artificial Sequence: Synthetic peptide
STLYCVKNLYCWTD

SEQ ID NO: 326 - protein, 14 aa, Artificial Sequence
  Description of Artificial Sequence: Synthetic peptide
NHLLCVDNLWCWID

SEQ ID NO: 327 - protein, 14 aa, Artificial Sequence
  Description of Artificial Sequence: Synthetic peptide
DALLCWRNLYCWTN

SEQ ID NO: 328 - protein, 14 aa, Artificial Sequence
  Description of Artificial Sequence: Synthetic peptide
DHLVCVQNLFCWID

SEQ ID NO: 329 - protein, 14 aa, Artificial Sequence
  Description of Artificial Sequence: Synthetic peptide
ATLSCFQNLYCWHI

SEQ ID NO: 330 - protein, 14 aa, Artificial Sequence
  Description of Artificial Sequence: Synthetic peptide
SNLFCVKNLFCWTD

SEQ ID NO: 331 - protein, 14 aa, Artificial Sequence
  Description of Artificial Sequence: Synthetic peptide
DTLFCVKNLFCWIT

SEQ ID NO: 332 - protein, 14 aa, Artificial Sequence
  Description of Artificial Sequence: Synthetic peptide
SVLWCVRNLYCWND

SEQ ID NO: 333 - protein, 14 aa, Artificial Sequence
  Description of Artificial Sequence: Synthetic peptide
DHLMCVKNLWCWVD

SEQ ID NO: 334 - protein, 14 aa, Artificial Sequence
  Description of Artificial Sequence: Synthetic peptide
NTLFCMDNIWCWHD

SEQ ID NO: 335 - protein, 14 aa, Artificial Sequence
  Description of Artificial Sequence: Synthetic peptide
VSLLCVKNLWCWHI

SEQ ID NO: 336 - protein, 14 aa, Artificial Sequence
  Description of Artificial Sequence: Synthetic peptide
HSLFCFKNLYCWNV

SEQ ID NO: 337 - protein, 14 aa, Artificial Sequence
  Description of Artificial Sequence: Synthetic peptide
DHLFCVQNLWCWIS

SEQ ID NO: 338 - protein, 14 aa, Artificial Sequence
  Description of Artificial Sequence: Synthetic peptide
SNLVCVNNLWCWID

SEQ ID NO: 339 - protein, 14 aa, Artificial Sequence
  Description of Artificial Sequence: Synthetic peptide
NHLVCVNNLWCWHD

SEQ ID NO: 340 - protein, 14 aa, Artificial Sequence
  Description of Artificial Sequence: Synthetic peptide
TNLVCVNNLWCWLD

SEQ ID NO: 341 - protein, 14 aa, Artificial Sequence
  Description of Artificial Sequence: Synthetic peptide
DTLFCVRNLYCWID

SEQ ID NO: 342 - protein, 14 aa, Artificial Sequence
  Description of Artificial Sequence: Synthetic peptide
NALLCLKNLYCWID

SEQ ID NO: 343 - protein, 14 aa, Artificial Sequence
  Description of Artificial Sequence: Synthetic peptide
TSLECWKNLWCWHS

SEQ ID NO: 344 - protein, 14 aa, Artificial Sequence
  Description of Artificial Sequence: Synthetic peptide
SHLFCVKNVFCWDD

SEQ ID NO: 345 - protein, 14 aa, Artificial Sequence
  Description of Artificial Sequence: Synthetic peptide
NALWCIQNLYCYTD

SEQ ID NO: 346 - protein, 14 aa, Artificial Sequence
  Description of Artificial Sequence: Synthetic peptide
NSLLCFQNLFCWHS

SEQ ID NO: 347 - protein, 14 aa, Artificial Sequence
  Description of Artificial Sequence: Synthetic peptide
SDLVCVKNLYCWNI

SEQ ID NO: 348 - protein, 14 aa, Artificial Sequence
  Description of Artificial Sequence: Synthetic peptide
HSLWCINNLYCWHD

SEQ ID NO: 349 - protein, 14 aa, Artificial Sequence
  Description of Artificial Sequence: Synthetic peptide
YALFCVKNLWCWNA

SEQ ID NO: 350 - protein, 14 aa, Artificial Sequence
  Description of Artificial Sequence: Synthetic peptide
AHLWCWKNLWCWVD

SEQ ID NO: 351 - protein, 14 aa, Artificial Sequence
  Description of Artificial Sequence: Synthetic peptide
DYLMCFRNLWCWHS

SEQ ID NO: 352 - protein, 14 aa, Artificial Sequence
  Description of Artificial Sequence: Synthetic peptide
SVWLCMLKLQCFYN

SEQ ID NO: 353 - protein, 14 aa, Artificial Sequence
  Description of Artificial Sequence: Synthetic peptide
YHFMCVNDFDCWFI

SEQ ID NO: 354 - protein, 14 aa, Artificial Sequence
  Description of Artificial Sequence: Synthetic peptide
YHFLCLNELYCWAI

SEQ ID NO: 355 - protein, 14 aa, Artificial Sequence
  Description of Artificial Sequence: Synthetic peptide
NVLFCYHNVYCWVN

SEQ ID NO: 356 - protein, 14 aa, Artificial Sequence
  Description of Artificial Sequence: Synthetic peptide
NFELCLKNLQCSFA

SEQ ID NO: 357 - protein, 14 aa, Artificial Sequence
  Description of Artificial Sequence: Synthetic peptide
YHFLCMNDLECWYI

SEQ ID NO: 358 - protein, 14 aa, Artificial Sequence
  Description of Artificial Sequence: Synthetic peptide
NYVLCLTKLPCWVI

SEQ ID NO: 359 - protein, 14 aa, Artificial Sequence
  Description of Artificial Sequence: Synthetic peptide
AYLVCVKNLFCWTH

SEQ ID NO: 360 - protein, 14 aa, Artificial Sequence
  Description of Artificial Sequence: Synthetic peptide
YDLLCVKQLQCRYH

SEQ ID NO: 361 - protein, 14 aa, Artificial Sequence
  Description of Artificial Sequence: Synthetic peptide
DLLMCVRNLYCWIN

SEQ ID NO: 362 - protein, 14 aa, Artificial Sequence
  Description of Artificial Sequence: Synthetic peptide
FDFLCFDEWQCLYL

SEQ ID NO: 363 - protein, 14 aa, Artificial Sequence
  Description of Artificial Sequence: Synthetic peptide
DFLVCVRNLYCWID

SEQ ID NO: 364 - protein, 14 aa, Artificial Sequence
  Description of Artificial Sequence: Synthetic peptide
LHRLCFENFQCRNY

SEQ ID NO: 365 - protein, 14 aa, Artificial Sequence
  Description of Artificial Sequence: Synthetic peptide
FNLMCAQDRDCASD

SEQ ID NO: 366 - protein, 14 aa, Artificial Sequence
  Description of Artificial Sequence: Synthetic peptide
SALFCFQNVYCWHS

SEQ ID NO: 367 - protein, 14 aa, Artificial Sequence
  Description of Artificial Sequence: Synthetic peptide
ADLFCVKNLWCWTS

SEQ ID NO: 368 - protein, 14 aa, Artificial Sequence
  Description of Artificial Sequence: Synthetic peptide
HSLFCVKNLFCWND

SEQ ID NO: 369 - protein, 14 aa, Artificial Sequence
  Description of Artificial Sequence: Synthetic peptide
NFLVCVQNLYCWID

SEQ ID NO: 370 - protein, 14 aa, Artificial Sequence
  Description of Artificial Sequence: Synthetic peptide
FSLMCVQNLYCWHV

SEQ ID NO: 371 - protein, 14 aa, Artificial Sequence
  Description of Artificial Sequence: Synthetic peptide
NALLCLNHLQCWHT

SEQ ID NO: 372 - protein, 14 aa, Artificial Sequence
  Description of Artificial Sequence: Synthetic peptide
AHLLCVQRPQCRVD

SEQ ID NO: 373 - protein, 14 aa, Artificial Sequence
  Description of Artificial Sequence: Synthetic peptide
SDLFCLQNVYCWHT

SEQ ID NO: 374 - protein, 14 aa, Artificial Sequence
  Description of Artificial Sequence: Synthetic peptide
STVQCIETPQCLIH

SEQ ID NO: 375 - protein, 14 aa, Artificial Sequence
  Description of Artificial Sequence: Synthetic peptide
VVLLCVNNVMCWPV

SEQ ID NO: 376 - protein, 14 aa, Artificial Sequence
  Description of Artificial Sequence: Synthetic peptide
DSLVCVKNLYCWIN

SEQ ID NO: 377 - protein, 14 aa, Artificial Sequence
  Description of Artificial Sequence: Synthetic peptide
VFLFCVENHQCSVY

SEQ ID NO: 378 - protein, 14 aa, Artificial Sequence
  Description of Artificial Sequence: Synthetic peptide
DSLLCVKRRQCWHL

SEQ ID NO: 379 - protein, 14 aa, Artificial Sequence
  Description of Artificial Sequence: Synthetic peptide
FVLFCGNDQQCWAS

SEQ ID NO: 380 - protein, 14 aa, Artificial Sequence
  Description of Artificial Sequence: Synthetic peptide
IPRLCLHKLWCGNS

SEQ ID NO: 381 - protein, 14 aa, Artificial Sequence
  Description of Artificial Sequence: Synthetic peptide
VSLMCVKNVFCWYA

SEQ ID NO: 382 - protein, 14 aa, Artificial Sequence
  Description of Artificial Sequence: Synthetic peptide
HTLLCFHNLWCWHD

SEQ ID NO: 383 - protein, 14 aa, Artificial Sequence
  Description of Artificial Sequence: Synthetic peptide
NALWCVNNLYCWVS

SEQ ID NO: 384 - protein, 14 aa, Artificial Sequence
  Description of Artificial Sequence: Synthetic peptide
ITLQCVQQLSCSLV

SEQ ID NO: 385 - protein, 14 aa, Artificial Sequence
  Description of Artificial Sequence: Synthetic peptide
NILVCVNNLWCWID

SEQ ID NO: 386 - protein, 14 aa, Artificial Sequence
  Description of Artificial Sequence: Synthetic peptide
PSLFCFQNLYCWID

SEQ ID NO: 387 - protein, 14 aa, Artificial Sequence
  Description of Artificial Sequence: Synthetic peptide
DYVLCVGSLPCWPI

SEQ ID NO: 388 - protein, 14 aa, Artificial Sequence
  Description of Artificial Sequence: Synthetic peptide
YYFLCFSSLNCVYV

SEQ ID NO: 389 - protein, 14 aa, Artificial Sequence
  Description of Artificial Sequence: Synthetic peptide
TNFLCGKNLQCLIA

SEQ ID NO: 390 - protein, 14 aa, Artificial Sequence
  Description of Artificial Sequence: Synthetic peptide
HYPLCVSNLQCLVY

SEQ ID NO: 391 - protein, 14 aa, Artificial Sequence
  Description of Artificial Sequence: Synthetic peptide
NHLLCVQNLYCWYD

SEQ ID NO: 392 - protein, 14 aa, Artificial Sequence
  Description of Artificial Sequence: Synthetic peptide
DSVFCVKKLQCWDN

SEQ ID NO: 393 - protein, 14 aa, Artificial Sequence
  Description of Artificial Sequence: Synthetic peptide
SVVLCVLNGQCFSA

SEQ ID NO: 394 - protein, 14 aa, Artificial Sequence
  Description of Artificial Sequence: Synthetic peptide
VDLSCLKKLQCLNA

SEQ ID NO: 395 - protein, 14 aa, Artificial Sequence
  Description of Artificial Sequence: Synthetic peptide
IHRLCTKIRYCFYY

SEQ ID NO: 396 - protein, 14 aa, Artificial Sequence
  Description of Artificial Sequence: Synthetic peptide
DYLFCVKNLYCWHN

SEQ ID NO: 397 - protein, 14 aa, Artificial Sequence
  Description of Artificial Sequence: Synthetic peptide
FTQFCARKMQCQDN

SEQ ID NO: 398 - protein, 14 aa, Artificial Sequence
  Description of Artificial Sequence: Synthetic peptide
IVLFCGRNLYCWYA

SEQ ID NO: 399 - protein, 14 aa, Artificial Sequence
  Description of Artificial Sequence: Synthetic peptide
LYLGCRRQLLCDDV

SEQ ID NO: 400 - protein, 14 aa, Artificial Sequence
  Description of Artificial Sequence: Synthetic peptide
YTLLCAKKQHCSAN

SEQ ID NO: 401 - protein, 14 aa, Artificial Sequence
  Description of Artificial Sequence: Synthetic peptide
HVVLCTSELQCQYS

SEQ ID NO: 402 - protein, 14 aa, Artificial Sequence
  Description of Artificial Sequence: Synthetic peptide
DTLMCIKNLYCWID

SEQ ID NO: 403 - protein, 14 aa, Artificial Sequence
  Description of Artificial Sequence: Synthetic peptide
SDLLCVRNLYCWIY

SEQ ID NO: 404 - protein, 14 aa, Artificial Sequence
  Description of Artificial Sequence: Synthetic peptide
YSLMCIQNLYCWND

SEQ ID NO: 405 - protein, 14 aa, Artificial Sequence
  Description of Artificial Sequence: Synthetic peptide
NTLFCVANLYCWIN

SEQ ID NO: 406 - protein, 14 aa, Artificial Sequence
  Description of Artificial Sequence: Synthetic peptide
SFLFCVQNIYCWHN

SEQ ID NO: 407 - protein, 14 aa, Artificial Sequence
  Description of Artificial Sequence: Synthetic peptide
YSLYCVRNLYCWSD

SEQ ID NO: 408 - protein, 14 aa, Artificial Sequence
  Description of Artificial Sequence: Synthetic peptide
DTLFCVRNLYCWIS

SEQ ID NO: 409 - protein, 14 aa, Artificial Sequence
  Description of Artificial Sequence: Synthetic peptide
YDLVCVHNIYCWNF

SEQ ID NO: 410 - protein, 14 aa, Artificial Sequence
  Description of Artificial Sequence: Synthetic peptide
DVLKCVKNLWCWID

SEQ ID NO: 411 - protein, 14 aa, Artificial Sequence
  Description of Artificial Sequence: Synthetic peptide
NDLFCFQNLYCWTD

SEQ ID NO: 412 - protein, 14 aa, Artificial Sequence
  Description of Artificial Sequence: Synthetic peptide
NALFCVRNLYCWVN

SEQ ID NO: 413 - protein, 14 aa, Artificial Sequence
  Description of Artificial Sequence: Synthetic peptide
SNLLCIKNLYCWHD

SEQ ID NO: 414 - protein, 14 aa, Artificial Sequence
  Description of Artificial Sequence: Synthetic peptide
TTLYCVRNLYCWHT

SEQ ID NO: 415 - protein, 14 aa, Artificial Sequence
  Description of Artificial Sequence: Synthetic peptide
AVLVCFQNLYCWID

SEQ ID NO: 416 - protein, 14 aa, Artificial Sequence
  Description of Artificial Sequence: Synthetic peptide
FDLFCVQNLYCWNT

SEQ ID NO: 417 - protein, 14 aa, Artificial Sequence
  Description of Artificial Sequence: Synthetic peptide
PTLLCVQNLFCWIA

SEQ ID NO: 418 - protein, 14 aa, Artificial Sequence
  Description of Artificial Sequence: Synthetic peptide
HTLFCVQNLYCWID

SEQ ID NO: 419 - protein, 14 aa, Artificial Sequence
  Description of Artificial Sequence: Synthetic peptide
ATLFCVRNLYCWID

SEQ ID NO: 420 - protein, 14 aa, Artificial Sequence
  Description of Artificial Sequence: Synthetic peptide
NSLFCLKNLYCWVD

SEQ ID NO: 421 - protein, 14 aa, Artificial Sequence
  Description of Artificial Sequence: Synthetic peptide
TNLVCVKNLWCWHD

SEQ ID NO: 422 - protein, 14 aa, Artificial Sequence
  Description of Artificial Sequence: Synthetic peptide
DVLQCIKNLYCWID

SEQ ID NO: 423 - protein, 14 aa, Artificial Sequence
  Description of Artificial Sequence: Synthetic peptide
NVLFCLKNLECWID

SEQ ID NO: 424 - protein, 14 aa, Artificial Sequence
  Description of Artificial Sequence: Synthetic peptide
DTLYCVKNLWCWID

SEQ ID NO: 425 - protein, 14 aa, Artificial Sequence
  Description of Artificial Sequence: Synthetic peptide
NTLFCVKNLYCWTD

SEQ ID NO: 426 - protein, 14 aa, Artificial Sequence
  Description of Artificial Sequence: Synthetic peptide
TTLWCVQNLYCWHL

SEQ ID NO: 427 - protein, 14 aa, Artificial Sequence
  Description of Artificial Sequence: Synthetic peptide
ALLMCVNNLWCWHD

SEQ ID NO: 428 - protein, 14 aa, Artificial Sequence
  Description of Artificial Sequence: Synthetic peptide
NTLFCVQNLFCWVD

SEQ ID NO: 429 - protein, 14 aa, Artificial Sequence
  Description of Artificial Sequence: Synthetic peptide
NSLVCVKNLYCWVD

SEQ ID NO: 430 - protein, 14 aa, Artificial Sequence
  Description of Artificial Sequence: Synthetic peptide
NSLFCVQNLYCWID

SEQ ID NO: 431 - protein, 14 aa, Artificial Sequence
  Description of Artificial Sequence: Synthetic peptide
NALLCVKNVYCWIA

SEQ ID NO: 432 - protein, 14 aa, Artificial Sequence
  Description of Artificial Sequence: Synthetic peptide
NDLVCVMNLWCWND

SEQ ID NO: 433 - protein, 14 aa, Artificial Sequence
  Description of Artificial Sequence: Synthetic peptide
YDLFCVNNLWCWHD

SEQ ID NO: 434 - protein, 14 aa, Artificial Sequence
  Description of Artificial Sequence: Synthetic peptide
DTLLCVKNLFCYII

SEQ ID NO: 435 - protein, 14 aa, Artificial Sequence
  Description of Artificial Sequence: Synthetic peptide
NSLFCIHNLYCWID

SEQ ID NO: 436 - protein, 14 aa, Artificial Sequence
  Description of Artificial Sequence: Synthetic peptide
ASLMCVNNLWCWHT

SEQ ID NO: 437 - protein, 14 aa, Artificial Sequence
  Description of Artificial Sequence: Synthetic peptide
YALVCVQNIYCWNY

SEQ ID NO: 438 - protein, 14 aa, Artificial Sequence
  Description of Artificial Sequence: Synthetic peptide
DSLICVRNLYCWHY

SEQ ID NO: 439 - protein, 14 aa, Artificial Sequence
  Description of Artificial Sequence: Synthetic peptide
NVLICVNNVYCWID

SEQ ID NO: 440 - protein, 14 aa, Artificial Sequence
  Description of Artificial Sequence: Synthetic peptide
NTLFCVKNLYCWTY

SEQ ID NO: 441 - protein, 14 aa, Artificial Sequence
  Description of Artificial Sequence: Synthetic peptide
NVLLCIDNLYCWID

SEQ ID NO: 442 - protein, 14 aa, Artificial Sequence
  Description of Artificial Sequence: Synthetic peptide
TDLFCVKNLWCWHN

SEQ ID NO: 443 - protein, 14 aa, Artificial Sequence
  Description of Artificial Sequence: Synthetic peptide
ASLMCVRNLYCWND

SEQ ID NO: 444 - protein, 14 aa, Artificial Sequence
  Description of Artificial Sequence: Synthetic peptide
SDLFCVQNVYCWHH

SEQ ID NO: 445 - protein, 14 aa, Artificial Sequence
  Description of Artificial Sequence: Synthetic peptide
SFLYCVQNIYCWTV

SEQ ID NO: 446 - protein, 14 aa, Artificial Sequence
  Description of Artificial Sequence: Synthetic peptide
ASLFCVRNLYCWND

SEQ ID NO: 447 - protein, 14 aa, Artificial Sequence
  Description of Artificial Sequence: Synthetic peptide
NVLLCVKNLYCWND

SEQ ID NO: 448 - protein, 14 aa, Artificial Sequence
  Description of Artificial Sequence: Synthetic peptide
SILLCVKNLYCWHV

SEQ ID NO: 449 - protein, 14 aa, Artificial Sequence
  Description of Artificial Sequence: Synthetic peptide
AHLVCVKNLYCWIS

SEQ ID NO: 450 - protein, 14 aa, Artificial Sequence
  Description of Artificial Sequence: Synthetic peptide
HALFCVKNLYCWND

SEQ ID NO: 451 - protein, 14 aa, Artificial Sequence
  Description of Artificial Sequence: Synthetic peptide
ATLLCVQNVFCWHS

SEQ ID NO: 452 - protein, 14 aa, Artificial Sequence
  Description of Artificial Sequence: Synthetic peptide
FSLVCVNNLWCWID

SEQ ID NO: 453 - protein, 14 aa, Artificial Sequence
  Description of Artificial Sequence: Synthetic peptide
HALFCVQNLYCWTD

SEQ ID NO: 454 - protein, 14 aa, Artificial Sequence
  Description of Artificial Sequence: Synthetic peptide
YDLVCVRNLYCWNI

SEQ ID NO: 455 - protein, 14 aa, Artificial Sequence
  Description of Artificial Sequence: Synthetic peptide
NSLVCVMNVYCWHI

SEQ ID NO: 456 - protein, 14 aa, Artificial Sequence
  Description of Artificial Sequence: Synthetic peptide
NLLVCVKNLYCWID

SEQ ID NO: 457 - protein, 14 aa, Artificial Sequence
  Description of Artificial Sequence: Synthetic peptide
SSLFCLRNLYCWNA

SEQ ID NO: 458 - protein, 14 aa, Artificial Sequence
  Description of Artificial Sequence: Synthetic peptide
ATLMCVNNIHCWIA

SEQ ID NO: 459 - protein, 14 aa, Artificial Sequence
  Description of Artificial Sequence: Synthetic peptide
TVLRCFRKDQCIFS

SEQ ID NO: 460 - protein, 14 aa, Artificial Sequence
  Description of Artificial Sequence: Synthetic peptide
NSLHCIQNLYCWII

SEQ ID NO: 461 - protein, 14 aa, Artificial Sequence
  Description of Artificial Sequence: Synthetic peptide
DILWCVRNLYCWHI

SEQ ID NO: 462 - protein, 14 aa, Artificial Sequence
  Description of Artificial Sequence: Synthetic peptide
TSLFCLQNLYCWHD

SEQ ID NO: 463 - protein, 14 aa, Artificial Sequence
  Description of Artificial Sequence: Synthetic peptide
FTLFCVQNLYCWNT

SEQ ID NO: 464 - protein, 14 aa, Artificial Sequence
  Description of Artificial Sequence: Synthetic peptide
SSLYCFKNLYCWTI

SEQ ID NO: 465 - protein, 14 aa, Artificial Sequence
  Description of Artificial Sequence: Synthetic peptide
NTLICFKNLYCWIA

SEQ ID NO: 466 - protein, 14 aa, Artificial Sequence
  Description of Artificial Sequence: Synthetic peptide
NSLLCVQNIYCWID

SEQ ID NO: 467 - protein, 14 aa, Artificial Sequence
  Description of Artificial Sequence: Synthetic peptide
DHLVCVNNLLCWIA

SEQ ID NO: 468 - protein, 14 aa, Artificial Sequence
  Description of Artificial Sequence: Synthetic peptide
SSLFCVQNLYCWTD

SEQ ID NO: 469 - protein, 14 aa, Artificial Sequence
  Description of Artificial Sequence: Synthetic peptide
VSLFCLENIYCWHN

SEQ ID NO: 470 - protein, 14 aa, Artificial Sequence
  Description of Artificial Sequence: Synthetic peptide
ATLFCLQNLYCWIS

SEQ ID NO: 471 - protein, 14 aa, Artificial Sequence
  Description of Artificial Sequence: Synthetic peptide
HDLMCVQNIYCWNI

SEQ ID NO: 472 - protein, 14 aa, Artificial Sequence
  Description of Artificial Sequence: Synthetic peptide
LLCVQNLYCWNTGG

SEQ ID NO: 473 - protein, 14 aa, Artificial Sequence
  Description of Artificial Sequence: Synthetic peptide
NSLVCVNNVYCWVV

SEQ ID NO: 474 - protein, 14 aa, Artificial Sequence
  Description of Artificial Sequence: Synthetic peptide
NFLLCVKNVYCWID

SEQ ID NO: 475 - protein, 14 aa, Artificial Sequence
  Description of Artificial Sequence: Synthetic peptide
SALFCVQNLYCWTD

SEQ ID NO: 476 - protein, 14 aa, Artificial Sequence
  Description of Artificial Sequence: Synthetic peptide
LDLHCVQNVYCWIS

SEQ ID NO: 477 - protein, 14 aa, Artificial Sequence
  Description of Artificial Sequence: Synthetic peptide
DTLFCVRNLYCWIT

SEQ ID NO: 478 - protein, 14 aa, Artificial Sequence
  Description of Artificial Sequence: Synthetic peptide
FSLFCVNNLYCWTD

SEQ ID NO: 479 - protein, 14 aa, Artificial Sequence
  Description of Artificial Sequence: Synthetic peptide
DVLVCVKNLYCWIH

SEQ ID NO: 480 - protein, 14 aa, Artificial Sequence
  Description of Artificial Sequence: Synthetic peptide
SDLFCFQNLYCWHD

SEQ ID NO: 481 - protein, 14 aa, Artificial Sequence
  Description of Artificial Sequence: Synthetic peptide
SYLVCVQNVYCWVA

SEQ ID NO: 482 - protein, 14 aa, Artificial Sequence
  Description of Artificial Sequence: Synthetic peptide
TNLMCVRNLYCWHV

SEQ ID NO: 483 - protein, 14 aa, Artificial Sequence
  Description of Artificial Sequence: Synthetic peptide
NLLVCFRNVYCWHN

SEQ ID NO: 484 - protein, 14 aa, Artificial Sequence
  Description of Artificial Sequence: Synthetic peptide
NTLLCVQNLYCWID

SEQ ID NO: 485 - protein, 14 aa, Artificial Sequence
  Description of Artificial Sequence: Synthetic peptide
NLLFCVNNLWCWND

SEQ ID NO: 486 - protein, 14 aa, Artificial Sequence
  Description of Artificial Sequence: Synthetic peptide
DALWCYQNIYCWID

SEQ ID NO: 487 - protein, 14 aa, Artificial Sequence
  Description of Artificial Sequence: Synthetic peptide
HYLLCVKNVYCWTV

SEQ ID NO: 488 - protein, 14 aa, Artificial Sequence
  Description of Artificial Sequence: Synthetic peptide
DSLFCFKNVYCWLA

SEQ ID NO: 489 - protein, 14 aa, Artificial Sequence
  Description of Artificial Sequence: Synthetic peptide
VSLVCVKNIYCWHD

SEQ ID NO: 490 - protein, 14 aa, Artificial Sequence
  Description of Artificial Sequence: Synthetic peptide
LSLFCVKNLYCWTD

SEQ ID NO: 491 - protein, 14 aa, Artificial Sequence
  Description of Artificial Sequence: Synthetic peptide
NSLFCVRNIYCWHD

SEQ ID NO: 492 - protein, 14 aa, Artificial Sequence
  Description of Artificial Sequence: Synthetic peptide
SHLFCVQNIYCWVI

SEQ ID NO: 493 - protein, 14 aa, Artificial Sequence
  Description of Artificial Sequence: Synthetic peptide
NTLMCFENLYCWID

SEQ ID NO: 494 - protein, 14 aa, Artificial Sequence
  Description of Artificial Sequence: Synthetic peptide
FSLFCVENVYCWND

SEQ ID NO: 495 - protein, 14 aa, Artificial Sequence
  Description of Artificial Sequence: Synthetic peptide
NALFCWQNLYCWND

SEQ ID NO: 496 - protein, 14 aa, Artificial Sequence
  Description of Artificial Sequence: Synthetic peptide
NVLRCVQNLYCWID

SEQ ID NO: 497 - protein, 14 aa, Artificial Sequence
  Description of Artificial Sequence: Synthetic peptide
YSLLCFQNMYCWNV

SEQ ID NO: 498 - protein, 14 aa, Artificial Sequence
  Description of Artificial Sequence: Synthetic peptide
THLVCVRNLYCWVI

SEQ ID NO: 499 - protein, 14 aa, Artificial Sequence
  Description of Artificial Sequence: Synthetic peptide
FSLYCFQNLYCWHD

SEQ ID NO: 500 - protein, 14 aa, Artificial Sequence
  Description of Artificial Sequence: Synthetic peptide
NSLFCVKNVYCWND

SEQ ID NO: 501 - protein, 14 aa, Artificial Sequence
  Description of Artificial Sequence: Synthetic peptide
DHLLCVNNLWCWIS

SEQ ID NO: 502 - protein, 14 aa, Artificial Sequence
  Description of Artificial Sequence: Synthetic peptide
NSLFCVKNLYCWII

SEQ ID NO: 503 - protein, 14 aa, Artificial Sequence
  Description of Artificial Sequence: Synthetic peptide
TDLVCVKNLYCWHS

SEQ ID NO: 504 - protein, 14 aa, Artificial Sequence
  Description of Artificial Sequence: Synthetic peptide
FALYCIENVHCWHI

SEQ ID NO: 505 - protein, 14 aa, Artificial Sequence
  Description of Artificial Sequence: Synthetic peptide
AALICIKNLWCWHA

SEQ ID NO: 506 - protein, 14 aa, Artificial Sequence
  Description of Artificial Sequence: Synthetic peptide
HTLVCVKNLYCWIN

SEQ ID NO: 507 - protein, 14 aa, Artificial Sequence
  Description of Artificial Sequence: Synthetic peptide
YHLFCVKNLYCWNV

SEQ ID NO: 508 - protein, 14 aa, Artificial Sequence
  Description of Artificial Sequence: Synthetic peptide
DLLFCFRNLWCWNN

SEQ ID NO: 509 - protein, 14 aa, Artificial Sequence
  Description of Artificial Sequence: Synthetic peptide
YDLFCVRNLYCWHD

SEQ ID NO: 510 - protein, 14 aa, Artificial Sequence
  Description of Artificial Sequence: Synthetic peptide
NALLCFQNIYCWVD

SEQ ID NO: 511 - protein, 14 aa, Artificial Sequence
  Description of Artificial Sequence: Synthetic peptide
DVLVCLRNLFCWVD

SEQ ID NO: 512 - protein, 14 aa, Artificial Sequence
  Description of Artificial Sequence: Synthetic peptide
YHLWCVKNVYCWND

SEQ ID NO: 513 - protein, 14 aa, Artificial Sequence
  Description of Artificial Sequence: Synthetic peptide
NTLFCVHNLYCWHV

SEQ ID NO: 514 - protein, 14 aa, Artificial Sequence
  Description of Artificial Sequence: Synthetic peptide
NILLCVQNLYCWID

SEQ ID NO: 515 - protein, 14 aa, Artificial Sequence
  Description of Artificial Sequence: Synthetic peptide
NALFCVRNLYCWNA

SEQ ID NO: 516 - protein, 14 aa, Artificial Sequence
  Description of Artificial Sequence: Synthetic peptide
NALVCVHNLYCWIS

SEQ ID NO: 517 - protein, 14 aa, Artificial Sequence
  Description of Artificial Sequence: Synthetic peptide
YDLICVRNLYCWTA

SEQ ID NO: 518 - protein, 14 aa, Artificial Sequence
  Description of Artificial Sequence: Synthetic peptide
NTLLCVKNLWCWHD

SEQ ID NO: 519 - protein, 14 aa, Artificial Sequence
  Description of Artificial Sequence: Synthetic peptide
AHLVCVQNLYCWIS

SEQ ID NO: 520 - protein, 14 aa, Artificial Sequence
  Description of Artificial Sequence: Synthetic peptide
NHLECVNNLYCWID

SEQ ID NO: 521 - protein, 14 aa, Artificial Sequence
  Description of Artificial Sequence: Synthetic peptide
NTLFCVKNLYCWID

SEQ ID NO: 522 - protein, 14 aa, Artificial Sequence
  Description of Artificial Sequence: Synthetic peptide
YDLVCVKNLWCWHT

SEQ ID NO: 523 - protein, 14 aa, Artificial Sequence
  Description of Artificial Sequence: Synthetic peptide
DSLMCFQNLYCWHV

SEQ ID NO: 524 - protein, 14 aa, Artificial Sequence
  Description of Artificial Sequence: Synthetic peptide
SSLMCLNNLYCWII

SEQ ID NO: 525 - protein, 14 aa, Artificial Sequence
  Description of Artificial Sequence: Synthetic peptide
YDLFCFRNLYCWND

SEQ ID NO: 526 - protein, 14 aa, Artificial Sequence
  Description of Artificial Sequence: Synthetic peptide
YSLQCINNLWCWHD

SEQ ID NO: 527 - protein, 14 aa, Artificial Sequence
  Description of Artificial Sequence: Synthetic peptide
NTLLCFQNLWCWTN

SEQ ID NO: 528 - protein, 14 aa, Artificial Sequence
  Description of Artificial Sequence: Synthetic peptide
YPLMCFQNLYCWND

SEQ ID NO: 529 - protein, 14 aa, Artificial Sequence
  Description of Artificial Sequence: Synthetic peptide
VSLFCFQNLYCWTD

SEQ ID NO: 530 - protein, 14 aa, Artificial Sequence
  Description of Artificial Sequence: Synthetic peptide
DVLFCFQNLYCWHS

SEQ ID NO: 531 - protein, 14 aa, Artificial Sequence
  Description of Artificial Sequence: Synthetic peptide
YNLFCVKNLYCWTD

SEQ ID NO: 532 - protein, 14 aa, Artificial Sequence
  Description of Artificial Sequence: Synthetic peptide
LDLLCVRNIYCWIS

SEQ ID NO: 533 - protein, 14 aa, Artificial Sequence
  Description of Artificial Sequence: Synthetic peptide
NSLFCINNVYCWIT

SEQ ID NO: 534 - protein, 14 aa, Artificial Sequence
  Description of Artificial Sequence: Synthetic peptide
SDLVCVHNLWCWHD

SEQ ID NO: 535 - protein, 14 aa, Artificial Sequence
  Description of Artificial Sequence: Synthetic peptide
DSLFCVKNLFCWTD

SEQ ID NO: 536 - protein, 14 aa, Artificial Sequence
  Description of Artificial Sequence: Synthetic peptide
DSLVCVKNLWCWIT

SEQ ID NO: 537 - protein, 14 aa, Artificial Sequence
  Description of Artificial Sequence: Synthetic peptide
HNLFCVQNLWCWND

SEQ ID NO: 538 - protein, 14 aa, Artificial Sequence
  Description of Artificial Sequence: Synthetic peptide
FSLFCVRNLYCWND

SEQ ID NO: 539 - protein, 14 aa, Artificial Sequence
  Description of Artificial Sequence: Synthetic peptide
FSLFCVNNLYCWND

SEQ ID NO: 540 - protein, 14 aa, Artificial Sequence
  Description of Artificial Sequence: Synthetic peptide
DHLLCVQNLYCWIA

SEQ ID NO: 541 - protein, 14 aa, Artificial Sequence
  Description of Artificial Sequence: Synthetic peptide
HTLFCVKNVYCWLD

SEQ ID NO: 542 - protein, 14 aa, Artificial Sequence
  Description of Artificial Sequence: Synthetic peptide
ADLWCWKNLYCWHD

SEQ ID NO: 543 - protein, 14 aa, Artificial Sequence
  Description of Artificial Sequence: Synthetic peptide
NSLVCWHNLYCWNN

SEQ ID NO: 544 - protein, 14 aa, Artificial Sequence
  Description of Artificial Sequence: Synthetic peptide
SYLWCVKNLYCWND

SEQ ID NO: 545 - protein, 14 aa, Artificial Sequence
  Description of Artificial Sequence: Synthetic peptide
THLLCFQNIYCWYD

SEQ ID NO: 546 - protein, 14 aa, Artificial Sequence
  Description of Artificial Sequence: Synthetic peptide
ALLFCIKNLYCWNS

SEQ ID NO: 547 - protein, 14 aa, Artificial Sequence
  Description of Artificial Sequence: Synthetic peptide
SALFCFQNLYCWNA

SEQ ID NO: 548 - protein, 14 aa, Artificial Sequence
  Description of Artificial Sequence: Synthetic peptide
DALFCVKNRFCWVV

SEQ ID NO: 549 - protein, 14 aa, Artificial Sequence
  Description of Artificial Sequence: Synthetic peptide
HSLFCVKNLYCWNN

SEQ ID NO: 550 - protein, 14 aa, Artificial Sequence
  Description of Artificial Sequence: Synthetic peptide
NHLFCIQNLYCWTS

SEQ ID NO: 551 - protein, 14 aa, Artificial Sequence
  Description of Artificial Sequence: Synthetic peptide
TVLFCLQNVYCWNI

SEQ ID NO: 552 - protein, 14 aa, Artificial Sequence
  Description of Artificial Sequence: Synthetic peptide
DSLICVKNLFCWVD

SEQ ID NO: 553 - protein, 14 aa, Artificial Sequence
  Description of Artificial Sequence: Synthetic peptide
SDLLCVRNLYCWHD

SEQ ID NO: 554 - protein, 14 aa, Artificial Sequence
  Description of Artificial Sequence: Synthetic peptide
SYLVCFQNLYCWID

SEQ ID NO: 555 - protein, 14 aa, Artificial Sequence
  Description of Artificial Sequence: Synthetic peptide
YHLVCVKNLYCWNV

SEQ ID NO: 556 - protein, 14 aa, Artificial Sequence
  Description of Artificial Sequence: Synthetic peptide
NHLVCVKNVWCYID

SEQ ID NO: 557 - protein, 14 aa, Artificial Sequence
  Description of Artificial Sequence: Synthetic peptide
TDLLCWRNLYCWYD

SEQ ID NO: 558 - protein, 14 aa, Artificial Sequence
  Description of Artificial Sequence: Synthetic peptide
HYLECLQNVSCWIT

SEQ ID NO: 559 - protein, 14 aa, Artificial Sequence
  Description of Artificial Sequence: Synthetic peptide
FSLMCEKNLWCWLV

SEQ ID NO: 560 - protein, 14 aa, Artificial Sequence
  Description of Artificial Sequence: Synthetic peptide
TSLMCVKNIFCWNT

SEQ ID NO: 561 - protein, 14 aa, Artificial Sequence
  Description of Artificial Sequence: Synthetic peptide
NVLYCVQNVYCWIT

SEQ ID NO: 562 - protein, 14 aa, Artificial Sequence
  Description of Artificial Sequence: Synthetic peptide
ANLVCVHNLWCWID

SEQ ID NO: 563 - protein, 14 aa, Artificial Sequence
  Description of Artificial Sequence: Synthetic peptide
YDLFCFKNLYCWHV

SEQ ID NO: 564 - protein, 14 aa, Artificial Sequence
  Description of Artificial Sequence: Synthetic peptide
AHLVCVRNLYCWIN

SEQ ID NO: 565 - protein, 14 aa, Artificial Sequence
  Description of Artificial Sequence: Synthetic peptide
NTLFCVNNLWCWID

SEQ ID NO: 566 - protein, 14 aa, Artificial Sequence
  Description of Artificial Sequence: Synthetic peptide
YTLFCVQNLYCWTV

SEQ ID NO: 567 - protein, 14 aa, Artificial Sequence
  Description of Artificial Sequence: Synthetic peptide
NHLVCFQNLYCWHD

SEQ ID NO: 568 - protein, 14 aa, Artificial Sequence
  Description of Artificial Sequence: Synthetic peptide
NALFCVNNLWCWTV

SEQ ID NO: 569 - protein, 14 aa, Artificial Sequence
  Description of Artificial Sequence: Synthetic peptide
NSLLCFHNLYCWVN

SEQ ID NO: 570 - protein, 14 aa, Artificial Sequence
  Description of Artificial Sequence: Synthetic peptide
SSLFCVKNLYCWTN

SEQ ID NO: 571 - protein, 14 aa, Artificial Sequence
  Description of Artificial Sequence: Synthetic peptide
NTLFCFHNVYCWND

SEQ ID NO: 572 - protein, 14 aa, Artificial Sequence
  Description of Artificial Sequence: Synthetic peptide
SDLFCIQNVYCWHD

SEQ ID NO: 573 - protein, 14 aa, Artificial Sequence
  Description of Artificial Sequence: Synthetic peptide
NLLFCVKNLYCWID

SEQ ID NO: 574 - protein, 14 aa, Artificial Sequence
  Description of Artificial Sequence: Synthetic peptide
HDLFCFQNVYCWTV

SEQ ID NO: 575 - protein, 14 aa, Artificial Sequence
  Description of Artificial Sequence: Synthetic peptide
VNLMCVRNLYCWID

SEQ ID NO: 576 - protein, 14 aa, Artificial Sequence
  Description of Artificial Sequence: Synthetic peptide
YSLYCVKNLYCWTH

SEQ ID NO: 577 - protein, 14 aa, Artificial Sequence
  Description of Artificial Sequence: Synthetic peptide
VSLLCVKNLYCWHS

SEQ ID NO: 578 - protein, 14 aa, Artificial Sequence
  Description of Artificial Sequence: Synthetic peptide
VDLMCIKNLWCWHN

SEQ ID NO: 579 - protein, 14 aa, Artificial Sequence
  Description of Artificial Sequence: Synthetic peptide
DTLVCVKNLWCWID

SEQ ID NO: 580 - protein, 14 aa, Artificial Sequence
  Description of Artificial Sequence: Synthetic peptide
NTLVCVKNLWCWIN

SEQ ID NO: 581 - protein, 14 aa, Artificial Sequence
  Description of Artificial Sequence: Synthetic peptide
VSLFCVKNLYCWHS

SEQ ID NO: 582 - protein, 14 aa, Artificial Sequence
  Description of Artificial Sequence: Synthetic peptide
PSLFCVNNLFCWID

SEQ ID NO: 583 - protein, 14 aa, Artificial Sequence
  Description of Artificial Sequence: Synthetic peptide
NSLSCVRNLYCWIV

SEQ ID NO: 584 - protein, 14 aa, Artificial Sequence
  Description of Artificial Sequence: Synthetic peptide
TSLFCVQNLFCWHA

SEQ ID NO: 585 - protein, 14 aa, Artificial Sequence
  Description of Artificial Sequence: Synthetic peptide
SDLFCVKNLYCWNT

SEQ ID NO: 586 - protein, 14 aa, Artificial Sequence
  Description of Artificial Sequence: Synthetic peptide
HSLFCVKNLYCWTN

SEQ ID NO: 587 - protein, 14 aa, Artificial Sequence
  Description of Artificial Sequence: Synthetic peptide
ATLMCVNNLWCWIN

SEQ ID NO: 588 - protein, 14 aa, Artificial Sequence
  Description of Artificial Sequence: Synthetic peptide
ASLVCFQNLYCWHS

SEQ ID NO: 589 - protein, 14 aa, Artificial Sequence
  Description of Artificial Sequence: Synthetic peptide
NHLVCVNNLYCWIN

SEQ ID NO: 590 - protein, 14 aa, Artificial Sequence
  Description of Artificial Sequence: Synthetic peptide
NNLFCHKNLFCWVN

SEQ ID NO: 591 - protein, 14 aa, Artificial Sequence
  Description of Artificial Sequence: Synthetic peptide
AALFCVKNLYCWVD

SEQ ID NO: 592 - protein, 14 aa, Artificial Sequence
  Description of Artificial Sequence: Synthetic peptide
SDLICVRNLYCWID

SEQ ID NO: 593 - protein, 14 aa, Artificial Sequence
  Description of Artificial Sequence: Synthetic peptide
ATLFCVQNLYCWHS

SEQ ID NO: 594 - protein, 14 aa, Artificial Sequence
  Description of Artificial Sequence: Synthetic peptide
STLVCVRNLYCWNA

SEQ ID NO: 595 - protein, 14 aa, Artificial Sequence
  Description of Artificial Sequence: Synthetic peptide
TDLMCVRNLYCWNN

SEQ ID NO: 596 - protein, 14 aa, Artificial Sequence
  Description of Artificial Sequence: Synthetic peptide
YTLFCVNNLYCWTH

SEQ ID NO: 597 - protein, 14 aa, Artificial Sequence
  Description of Artificial Sequence: Synthetic peptide
YSLICVRNLYCWAD

SEQ ID NO: 598 - protein, 14 aa, Artificial Sequence
  Description of Artificial Sequence: Synthetic peptide
NTLVCVNNLYCWIY

SEQ ID NO: 599 - protein, 14 aa, Artificial Sequence
  Description of Artificial Sequence: Synthetic peptide
TTLFCFQNLYCWHV

SEQ ID NO: 600 - protein, 14 aa, Artificial Sequence
  Description of Artificial Sequence: Synthetic peptide
NILMCVRNLYCWIH

SEQ ID NO: 601 - protein, 14 aa, Artificial Sequence
  Description of Artificial Sequence: Synthetic peptide
FSLVCVKNVYCWHI

SEQ ID NO: 602 - protein, 14 aa, Artificial Sequence
  Description of Artificial Sequence: Synthetic peptide
NVLICVQNLYCWID

SEQ ID NO: 603 - protein, 14 aa, Artificial Sequence
  Description of Artificial Sequence: Synthetic peptide
DTLSCVRNVFCWIV

SEQ ID NO: 604 - protein, 14 aa, Artificial Sequence
  Description of Artificial Sequence: Synthetic peptide
DLLFCIRNLYCWIN

SEQ ID NO: 605 - protein, 14 aa, Artificial Sequence
  Description of Artificial Sequence: Synthetic peptide
AHLVCVNNLYCWTD

SEQ ID NO: 606 - protein, 14 aa, Artificial Sequence
  Description of Artificial Sequence: Synthetic peptide
DNLICVKNLQCWTI

SEQ ID NO: 607 - protein, 14 aa, Artificial Sequence
  Description of Artificial Sequence: Synthetic peptide
LTLFCVKNLYCWHA

SEQ ID NO: 608 - protein, 14 aa, Artificial Sequence
  Description of Artificial Sequence: Synthetic peptide
NTLLCVDNLWCWID

SEQ ID NO: 609 - protein, 14 aa, Artificial Sequence
  Description of Artificial Sequence: Synthetic peptide
PALFCVKNIYCWID

SEQ ID NO: 610 - protein, 14 aa, Artificial Sequence
  Description of Artificial Sequence: Synthetic peptide
NTLFCFRNLWCWND

SEQ ID NO: 611 - protein, 14 aa, Artificial Sequence
  Description of Artificial Sequence: Synthetic peptide
HSLFCVMNLYCWIT

SEQ ID NO: 612 - protein, 14 aa, Artificial Sequence
  Description of Artificial Sequence: Synthetic peptide
PTLMCVRNLYCWVT

SEQ ID NO: 613 - protein, 14 aa, Artificial Sequence
  Description of Artificial Sequence: Synthetic peptide
NYLFCLKNLYCWID

SEQ ID NO: 614 - protein, 14 aa, Artificial Sequence
  Description of Artificial Sequence: Synthetic peptide
YSLMCVKNLYCWHN

SEQ ID NO: 615 - protein, 14 aa, Artificial Sequence
  Description of Artificial Sequence: Synthetic peptide
NILLCLKNIYCWHV

SEQ ID NO: 616 - protein, 14 aa, Artificial Sequence
  Description of Artificial Sequence: Synthetic peptide
YTLLCVNNLYCWTV

SEQ ID NO: 617 - protein, 14 aa, Artificial Sequence
  Description of Artificial Sequence: Synthetic peptide
THLLCFQNLYCWNV

SEQ ID NO: 618 - protein, 14 aa, Artificial Sequence
  Description of Artificial Sequence: Synthetic peptide
STLLCFQNLWCWHD

SEQ ID NO: 619 - protein, 14 aa, Artificial Sequence
  Description of Artificial Sequence: Synthetic peptide
THLFCVQNIYCWNI

SEQ ID NO: 620 - protein, 14 aa, Artificial Sequence
  Description of Artificial Sequence: Synthetic peptide
NSLMCVRNVLCWIT

SEQ ID NO: 621 - protein, 14 aa, Artificial Sequence
  Description of Artificial Sequence: Synthetic peptide
DTLFCVRNLYCWIY

SEQ ID NO: 622 - protein, 14 aa, Artificial Sequence
  Description of Artificial Sequence: Synthetic peptide
SDLWCVMNLYCWHV

SEQ ID NO: 623 - protein, 14 aa, Artificial Sequence
  Description of Artificial Sequence: Synthetic peptide
NSLVCFKNLYCWIN

SEQ ID NO: 624 - protein, 14 aa, Artificial Sequence
  Description of Artificial Sequence: Synthetic peptide
NSLMCVKNFYCWID

SEQ ID NO: 625 - protein, 14 aa, Artificial Sequence
  Description of Artificial Sequence: Synthetic peptide
NSLVCVKNLYCWIN

SEQ ID NO: 626 - protein, 14 aa, Artificial Sequence
  Description of Artificial Sequence: Synthetic peptide
NALFCVQNLYCWVD

SEQ ID NO: 627 - protein, 14 aa, Artificial Sequence
  Description of Artificial Sequence: Synthetic peptide
HTLFCMENLWCWND

SEQ ID NO: 628 - protein, 14 aa, Artificial Sequence
  Description of Artificial Sequence: Synthetic peptide
NYLFCVKNLYCWIT

SEQ ID NO: 629 - protein, 14 aa, Artificial Sequence
  Description of Artificial Sequence: Synthetic peptide
NSLWCVKNLYCWTD

SEQ ID NO: 630 - protein, 14 aa, Artificial Sequence
  Description of Artificial Sequence: Synthetic peptide
NVLMCFRNIYCWNY

SEQ ID NO: 631 - protein, 14 aa, Artificial Sequence
  Description of Artificial Sequence: Synthetic peptide
NDLFCFRNIYCWND

SEQ ID NO: 632 - protein, 14 aa, Artificial Sequence
  Description of Artificial Sequence: Synthetic peptide
YSLMCVRNLYCWNL

SEQ ID NO: 633 - protein, 14 aa, Artificial Sequence
  Description of Artificial Sequence: Synthetic peptide
NTLFCVRNLYCWVN

SEQ ID NO: 634 - protein, 14 aa, Artificial Sequence
  Description of Artificial Sequence: Synthetic peptide
DHLLCVKNLFCWTI

SEQ ID NO: 635 - protein, 14 aa, Artificial Sequence
  Description of Artificial Sequence: Synthetic peptide
YDLLCVQNIYCWHV

SEQ ID NO: 636 - protein, 14 aa, Artificial Sequence
  Description of Artificial Sequence: Synthetic peptide
DSLFCFQNLWCWTD

SEQ ID NO: 637 - protein, 14 aa, Artificial Sequence
  Description of Artificial Sequence: Synthetic peptide
FTLFCVNNLYCWNS

SEQ ID NO: 638 - protein, 14 aa, Artificial Sequence
  Description of Artificial Sequence: Synthetic peptide
AALFCVKNLYCWTD

SEQ ID NO: 639 - protein, 14 aa, Artificial Sequence
  Description of Artificial Sequence: Synthetic peptide
YSLFCVKNIYCWVV

SEQ ID NO: 640 - protein, 14 aa, Artificial Sequence
  Description of Artificial Sequence: Synthetic peptide
NHLLCVKNLYCWIN

SEQ ID NO: 641 - protein, 14 aa, Artificial Sequence
  Description of Artificial Sequence: Synthetic peptide
FSLMCVQNLYCWHD

SEQ ID NO: 642 - protein, 14 aa, Artificial Sequence
  Description of Artificial Sequence: Synthetic peptide
ASLYCVMNIYCWTI

SEQ ID NO: 643 - protein, 14 aa, Artificial Sequence
  Description of Artificial Sequence: Synthetic peptide
QDLWCVDNLWCWID

SEQ ID NO: 644 - protein, 14 aa, Artificial Sequence
  Description of Artificial Sequence: Synthetic peptide
ADLICVRNLYCWID

SEQ ID NO: 645 - protein, 14 aa, Artificial Sequence
  Description of Artificial Sequence: Synthetic peptide
SDLICVRNLWCWNT

SEQ ID NO: 646 - protein, 14 aa, Artificial Sequence
  Description of Artificial Sequence: Synthetic peptide
NSLFCFRNLYCWTT

SEQ ID NO: 647 - protein, 14 aa, Artificial Sequence
  Description of Artificial Sequence: Synthetic peptide
SSLFCFQNLWCWND

SEQ ID NO: 648 - protein, 14 aa, Artificial Sequence
  Description of Artificial Sequence: Synthetic peptide
FTLFCVQNVYCWHS

SEQ ID NO: 649 - protein, 14 aa, Artificial Sequence
  Description of Artificial Sequence: Synthetic peptide
FSLYCVRNLYCWND

SEQ ID NO: 650 - protein, 14 aa, Artificial Sequence
  Description of Artificial Sequence: Synthetic peptide
HDLFCVRNLYCWND

SEQ ID NO: 651 - protein, 14 aa, Artificial Sequence
  Description of Artificial Sequence: Synthetic peptide
NYLVCLNNIYCWIA

SEQ ID NO: 652 - protein, 14 aa, Artificial Sequence
  Description of Artificial Sequence: Synthetic peptide
DTLFCLKNLWCWID

SEQ ID NO: 653 - protein, 14 aa, Artificial Sequence
  Description of Artificial Sequence: Synthetic peptide
TSLFCVHNIYCWHS

SEQ ID NO: 654 - protein, 14 aa, Artificial Sequence
  Description of Artificial Sequence: Synthetic peptide
YSLFCVRNLYCWNV

SEQ ID NO: 655 - protein, 14 aa, Artificial Sequence
  Description of Artificial Sequence: Synthetic peptide
TDLLCVRNLWCWHI

SEQ ID NO: 656 - protein, 14 aa, Artificial Sequence
  Description of Artificial Sequence: Synthetic peptide
LALFCVKNLYCWND

SEQ ID NO: 657 - protein, 14 aa, Artificial Sequence
  Description of Artificial Sequence: Synthetic peptide
NALFCVKNVYCWTY

SEQ ID NO: 658 - protein, 14 aa, Artificial Sequence
  Description of Artificial Sequence: Synthetic peptide
LSLMCVHNLYCWHI

SEQ ID NO: 659 - protein, 14 aa, Artificial Sequence
  Description of Artificial Sequence: Synthetic peptide
FTMFCVQNVFCWHA

SEQ ID NO: 660 - protein, 14 aa, Artificial Sequence
  Description of Artificial Sequence: Synthetic peptide
NSLFCVQNIWCWTD

SEQ ID NO: 661 - protein, 14 aa, Artificial Sequence
  Description of Artificial Sequence: Synthetic peptide
HALICVNNLWCWNT

SEQ ID NO: 662 - protein, 14 aa, Artificial Sequence
  Description of Artificial Sequence: Synthetic peptide
NHLMCLNNLWCWID

SEQ ID NO: 663 - protein, 14 aa, Artificial Sequence
  Description of Artificial Sequence: Synthetic peptide
NYLWCVHNLYCWTD

SEQ ID NO: 664 - protein, 14 aa, Artificial Sequence
  Description of Artificial Sequence: Synthetic peptide
NALMCVNNIWCWID

SEQ ID NO: 665 - protein, 14 aa, Artificial Sequence
  Description of Artificial Sequence: Synthetic peptide
NTLFCWQNLYCWIV

SEQ ID NO: 666 - protein, 14 aa, Artificial Sequence
  Description of Artificial Sequence: Synthetic peptide
NHLYCWKNLYCWID

SEQ ID NO: 667 - protein, 14 aa, Artificial Sequence
  Description of Artificial Sequence: Synthetic peptide
NLLFCVRNLYCWID

SEQ ID NO: 668 - protein, 14 aa, Artificial Sequence
  Description of Artificial Sequence: Synthetic peptide
YSLMCVNNLWCWNT

SEQ ID NO: 669 - protein, 14 aa, Artificial Sequence
  Description of Artificial Sequence: Synthetic peptide
GSLLCVKNLYCWID

SEQ ID NO: 670 - protein, 14 aa, Artificial Sequence
  Description of Artificial Sequence: Synthetic peptide
LDLVCVRNLYCWIN

SEQ ID NO: 671 - protein, 14 aa, Artificial Sequence
  Description of Artificial Sequence: Synthetic peptide
NALLCVQNVYCWID

SEQ ID NO: 672 - protein, 14 aa, Artificial Sequence
  Description of Artificial Sequence: Synthetic peptide
YTLFCLQNVYCYHI

SEQ ID NO: 673 - protein, 14 aa, Artificial Sequence
  Description of Artificial Sequence: Synthetic peptide
NYLVCVKNLECWIV

SEQ ID NO: 674 - protein, 14 aa, Artificial Sequence
  Description of Artificial Sequence: Synthetic peptide
SFLTCIQNIYCWVS

SEQ ID NO: 675 - protein, 14 aa, Artificial Sequence
  Description of Artificial Sequence: Synthetic peptide
LALFCYQNLFCWIN

SEQ ID NO: 676 - protein, 14 aa, Artificial Sequence
  Description of Artificial Sequence: Synthetic peptide
AHLMCVKNLYCWIV

SEQ ID NO: 677 - protein, 14 aa, Artificial Sequence
  Description of Artificial Sequence: Synthetic peptide
SDLICVKNLYCWYD

SEQ ID NO: 678 - protein, 14 aa, Artificial Sequence
  Description of Artificial Sequence: Synthetic peptide
HALFCVNNLWCWNT

SEQ ID NO: 679 - protein, 14 aa, Artificial Sequence
  Description of Artificial Sequence: Synthetic peptide
YTLFCIQNVHCWTV

SEQ ID NO: 680 - protein, 14 aa, Artificial Sequence
  Description of Artificial Sequence: Synthetic peptide
DNLRCVRNLYCWID

SEQ ID NO: 681 - protein, 14 aa, Artificial Sequence
  Description of Artificial Sequence: Synthetic peptide
DFLRCTKNLFCWID

SEQ ID NO: 682 - protein, 14 aa, Artificial Sequence
  Description of Artificial Sequence: Synthetic peptide
DHLLCFRNVYCWHI

SEQ ID NO: 683 - protein, 14 aa, Artificial Sequence
  Description of Artificial Sequence: Synthetic peptide
YVLLCVKNVYCWNE

SEQ ID NO: 684 - protein, 14 aa, Artificial Sequence
  Description of Artificial Sequence: Synthetic peptide
FSLMCIKNLYCWTT

SEQ ID NO: 685 - protein, 14 aa, Artificial Sequence
  Description of Artificial Sequence: Synthetic peptide
THLLCVKNIYCWHV

SEQ ID NO: 686 - protein, 14 aa, Artificial Sequence
  Description of Artificial Sequence: Synthetic peptide
ASLFCLQNLYCWNY

SEQ ID NO: 687 - protein, 14 aa, Artificial Sequence
  Description of Artificial Sequence: Synthetic peptide
HDLVCVNNLWCWND

SEQ ID NO: 688 - protein, 14 aa, Artificial Sequence
  Description of Artificial Sequence: Synthetic peptide
AALECFQNLWCWVI

SEQ ID NO: 689 - protein, 14 aa, Artificial Sequence
  Description of Artificial Sequence: Synthetic peptide
LDLICFQNVYCWYA

SEQ ID NO: 690 - protein, 14 aa, Artificial Sequence
  Description of Artificial Sequence: Synthetic peptide
NDLHCVMNLYCWVY

SEQ ID NO: 691 - protein, 14 aa, Artificial Sequence
  Description of Artificial Sequence: Synthetic peptide
NTLLCIENLYCWID

SEQ ID NO: 692 - protein, 14 aa, Artificial Sequence
  Description of Artificial Sequence: Synthetic peptide
ASLFCIQNLYCWTD

SEQ ID NO: 693 - protein, 14 aa, Artificial Sequence
  Description of Artificial Sequence: Synthetic peptide
NYLVCVNNLWCWIS

SEQ ID NO: 694 - protein, 14 aa, Artificial Sequence
  Description of Artificial Sequence: Synthetic peptide
NVLFCVKNYYCWII

SEQ ID NO: 695 - protein, 14 aa, Artificial Sequence
  Description of Artificial Sequence: Synthetic peptide
NYLFCLQNVYCWVD

SEQ ID NO: 696 - protein, 14 aa, Artificial Sequence
  Description of Artificial Sequence: Synthetic peptide
FSLHCFKNVYCWVV

SEQ ID NO: 697 - protein, 14 aa, Artificial Sequence
  Description of Artificial Sequence: Synthetic peptide
ASLFCIKNLWCWNN

SEQ ID NO: 698 - protein, 14 aa, Artificial Sequence
  Description of Artificial Sequence: Synthetic peptide
YSLFCVKNLYCWNA

SEQ ID NO: 699 - protein, 14 aa, Artificial Sequence
  Description of Artificial Sequence: Synthetic peptide
TYLYCFQNLYCWHV

SEQ ID NO: 700 - protein, 14 aa, Artificial Sequence
  Description of Artificial Sequence: Synthetic peptide
NVLFCINNLWCWTT

SEQ ID NO: 701 - protein, 14 aa, Artificial Sequence
  Description of Artificial Sequence: Synthetic peptide
NDLFCIMNVYCWNT

SEQ ID NO: 702 - protein, 14 aa, Artificial Sequence
  Description of Artificial Sequence: Synthetic peptide
NTLFCVRNLYCWNS

SEQ ID NO: 703 - protein, 14 aa, Artificial Sequence
  Description of Artificial Sequence: Synthetic peptide
FDLFCVRNLYCWTN

SEQ ID NO: 704 - protein, 14 aa, Artificial Sequence
  Description of Artificial Sequence: Synthetic peptide
NFLWCVNNVYCWID

SEQ ID NO: 705 - protein, 14 aa, Artificial Sequence
  Description of Artificial Sequence: Synthetic peptide
TYLFCFQNLYCWNL

SEQ ID NO: 706 - protein, 14 aa, Artificial Sequence
  Description of Artificial Sequence: Synthetic peptide
NSLMCVMNLYCWIT

SEQ ID NO: 707 - protein, 14 aa, Artificial Sequence
  Description of Artificial Sequence: Synthetic peptide
ASLFCVMNLYCWNV

SEQ ID NO: 708 - protein, 14 aa, Artificial Sequence
  Description of Artificial Sequence: Synthetic peptide
NTLFCVKNLYCWIA

SEQ ID NO: 709 - protein, 14 aa, Artificial Sequence
  Description of Artificial Sequence: Synthetic peptide
HSLFCIENLYCWND

SEQ ID NO: 710 - protein, 14 aa, Artificial Sequence
  Description of Artificial Sequence: Synthetic peptide
ADLICVMNVYCWVS

SEQ ID NO: 711 - protein, 14 aa, Artificial Sequence
  Description of Artificial Sequence: Synthetic peptide
HALMCVRNLYCWNA

SEQ ID NO: 712 - protein, 14 aa, Artificial Sequence
  Description of Artificial Sequence: Synthetic peptide
YPLVCFKNLYCWNH

SEQ ID NO: 713 - protein, 14 aa, Artificial Sequence
  Description of Artificial Sequence: Synthetic peptide
SHLFCYKNLYCWNY

SEQ ID NO: 714 - protein, 14 aa, Artificial Sequence
  Description of Artificial Sequence: Synthetic peptide
SDLWCVKNLYCWHV

SEQ ID NO: 715 - protein, 14 aa, Artificial Sequence
  Description of Artificial Sequence: Synthetic peptide
FSLFCVKNLYCWHA

SEQ ID NO: 716 - protein, 14 aa, Artificial Sequence
  Description of Artificial Sequence: Synthetic peptide
HTLMCFQNLYCWHN

SEQ ID NO: 717 - protein, 14 aa, Artificial Sequence
  Description of Artificial Sequence: Synthetic peptide
YSLFCVNNLWCWVD

SEQ ID NO: 718 - protein, 14 aa, Artificial Sequence
  Description of Artificial Sequence: Synthetic peptide
YPLFCVRNLYCWND

SEQ ID NO: 719 - protein, 14 aa, Artificial Sequence
  Description of Artificial Sequence: Synthetic peptide
NTLLCFQNLYCWID

SEQ ID NO: 720 - protein, 14 aa, Artificial Sequence
  Description of Artificial Sequence: Synthetic peptide
NSLLCIHNLWCWID

SEQ ID NO: 721 - protein, 14 aa, Artificial Sequence
  Description of Artificial Sequence: Synthetic peptide
TNLWCVRNVLCWHS

SEQ ID NO: 722 - protein, 14 aa, Artificial Sequence
  Description of Artificial Sequence: Synthetic peptide
HALFCVKNLYCWNS

SEQ ID NO: 723 - protein, 14 aa, Artificial Sequence
  Description of Artificial Sequence: Synthetic peptide
HTLVCVRNLYCWHN

SEQ ID NO: 724 - protein, 14 aa, Artificial Sequence
  Description of Artificial Sequence: Synthetic peptide
NHLVCFKNLYCWVS

SEQ ID NO: 725 - protein, 14 aa, Artificial Sequence
  Description of Artificial Sequence: Synthetic peptide
ATLLCVKNLWCWHT

SEQ ID NO: 726 - protein, 14 aa, Artificial Sequence
  Description of Artificial Sequence: Synthetic peptide
DHLLCVKNLFCWIA

SEQ ID NO: 727 - protein, 14 aa, Artificial Sequence
  Description of Artificial Sequence: Synthetic peptide
LDLFCWRNLYCWNA

SEQ ID NO: 728 - protein, 14 aa, Artificial Sequence
  Description of Artificial Sequence: Synthetic peptide
FDLFCVRNLYCRND

SEQ ID NO: 729 - protein, 14 aa, Artificial Sequence
  Description of Artificial Sequence: Synthetic peptide
YSLFCFHNLYCWID

SEQ ID NO: 730 - protein, 14 aa, Artificial Sequence
  Description of Artificial Sequence: Synthetic peptide
NTLMCVQNVYCWII

SEQ ID NO: 731 - protein, 14 aa, Artificial Sequence
  Description of Artificial Sequence: Synthetic peptide
NALFCVRNLYCWNF

SEQ ID NO: 732 - protein, 14 aa, Artificial Sequence
  Description of Artificial Sequence: Synthetic peptide
SSLMCVRNLYCWII

SEQ ID NO: 733 - protein, 14 aa, Artificial Sequence
  Description of Artificial Sequence: Synthetic peptide
HVLFCVQNIYCWTV

SEQ ID NO: 734 - protein, 14 aa, Artificial Sequence
  Description of Artificial Sequence: Synthetic peptide
SSLMCVNNLYCWTV

SEQ ID NO: 735 - protein, 14 aa, Artificial Sequence
  Description of Artificial Sequence: Synthetic peptide
HSLWCFQNLYCWNA

SEQ ID NO: 736 - protein, 14 aa, Artificial Sequence
  Description of Artificial Sequence: Synthetic peptide
NALYCVKNLWCWID

SEQ ID NO: 737 - protein, 14 aa, Artificial Sequence
  Description of Artificial Sequence: Synthetic peptide
TSMLCFQNLYCWHV

SEQ ID NO: 738 - protein, 14 aa, Artificial Sequence
  Description of Artificial Sequence: Synthetic peptide
YDLICVKNLWCWTT

SEQ ID NO: 739 - protein, 14 aa, Artificial Sequence
  Description of Artificial Sequence: Synthetic peptide
ADLFCVKNLYCWHV

SEQ ID NO: 740 - protein, 14 aa, Artificial Sequence
  Description of Artificial Sequence: Synthetic peptide
ASLFCVKNLYCWNA

SEQ ID NO: 741 - protein, 14 aa, Artificial Sequence
  Description of Artificial Sequence: Synthetic peptide
HSLFCVRNLYCWND

SEQ ID NO: 742 - protein, 14 aa, Artificial Sequence
  Description of Artificial Sequence: Synthetic peptide
NYLVCVKNLWCYIN

SEQ ID NO: 743 - protein, 14 aa, Artificial Sequence
  Description of Artificial Sequence: Synthetic peptide
NDLLCFQNIYCWNV

SEQ ID NO: 744 - protein, 14 aa, Artificial Sequence
  Description of Artificial Sequence: Synthetic peptide
TDLFCYRNLWCWHD

SEQ ID NO: 745 - protein, 14 aa, Artificial Sequence
  Description of Artificial Sequence: Synthetic peptide
IALLCFQNVYCWHI

SEQ ID NO: 746 - protein, 14 aa, Artificial Sequence
  Description of Artificial Sequence: Synthetic peptide
IDLVCFRNIWCWNT

SEQ ID NO: 747 - protein, 14 aa, Artificial Sequence
  Description of Artificial Sequence: Synthetic peptide
NALFCFHNLYCWID

SEQ ID NO: 748 - protein, 14 aa, Artificial Sequence
  Description of Artificial Sequence: Synthetic peptide
NNLFCVRNLYCWNI

SEQ ID NO: 749 - protein, 14 aa, Artificial Sequence
  Description of Artificial Sequence: Synthetic peptide
DTLFCVQNIWCWTA

SEQ ID NO: 750 - protein, 14 aa, Artificial Sequence
  Description of Artificial Sequence: Synthetic peptide
YHLFCVRNLYCWVS

SEQ ID NO: 751 - protein, 14 aa, Artificial Sequence
  Description of Artificial Sequence: Synthetic peptide
FSLLCVRNLYCWTV

SEQ ID NO: 752 - protein, 14 aa, Artificial Sequence
  Description of Artificial Sequence: Synthetic peptide
DTLVCVQNLYCWIS

SEQ ID NO: 753 - protein, 14 aa, Artificial Sequence
  Description of Artificial Sequence: Synthetic peptide
DHLVCVKNLLCWIN

SEQ ID NO: 754 - protein, 14 aa, Artificial Sequence
  Description of Artificial Sequence: Synthetic peptide
NYLFCVKNLYCWID

SEQ ID NO: 755 - protein, 14 aa, Artificial Sequence
  Description of Artificial Sequence: Synthetic peptide
HSLFCVNNLYCWTS

SEQ ID NO: 756 - protein, 14 aa, Artificial Sequence
  Description of Artificial Sequence: Synthetic peptide
NFLMCVKNLSCWID

SEQ ID NO: 757 - protein, 14 aa, Artificial Sequence
  Description of Artificial Sequence: Synthetic peptide
FALFCVNNLYCWND

SEQ ID NO: 758 - protein, 14 aa, Artificial Sequence
  Description of Artificial Sequence: Synthetic peptide
SYLYCLRNIYCWNT

SEQ ID NO: 759 - protein, 14 aa, Artificial Sequence
  Description of Artificial Sequence: Synthetic peptide
TSLLCVKNLWCWNV

SEQ ID NO: 760 - protein, 14 aa, Artificial Sequence
  Description of Artificial Sequence: Synthetic peptide
FSLMCVRNLYCWHT

SEQ ID NO: 761 - protein, 14 aa, Artificial Sequence
  Description of Artificial Sequence: Synthetic peptide
NYLYCLKNLYCWNI

SEQ ID NO: 762 - protein, 14 aa, Artificial Sequence
  Description of Artificial Sequence: Synthetic peptide
NHLLCVRNLYCWIT

SEQ ID NO: 763 - protein, 14 aa, Artificial Sequence
  Description of Artificial Sequence: Synthetic peptide
NYLFCVQNVYCWIA

SEQ ID NO: 764 - protein, 14 aa, Artificial Sequence
  Description of Artificial Sequence: Synthetic peptide
NTLMCVKNLFCWID

SEQ ID NO: 765 - protein, 14 aa, Artificial Sequence
  Description of Artificial Sequence: Synthetic peptide
DYLLCFQNVYCWHI

SEQ ID NO: 766 - protein, 14 aa, Artificial Sequence
  Description of Artificial Sequence: Synthetic peptide
HALFCVRNLYCWVD

SEQ ID NO: 767 - protein, 14 aa, Artificial Sequence
  Description of Artificial Sequence: Synthetic peptide
SDLFCVMNVYCWHI

SEQ ID NO: 768 - protein, 14 aa, Artificial Sequence
  Description of Artificial Sequence: Synthetic peptide
NVLFCVKNLYCWID

SEQ ID NO: 769 - protein, 14 aa, Artificial Sequence
  Description of Artificial Sequence: Synthetic peptide
SSLFCFQNLYCWVD

SEQ ID NO: 770 - protein, 14 aa, Artificial Sequence
  Description of Artificial Sequence: Synthetic peptide
NTLFCVKNLYCWTS

SEQ ID NO: 771 - protein, 14 aa, Artificial Sequence
  Description of Artificial Sequence: Synthetic peptide
PHLMCVQNIYCWII

SEQ ID NO: 772 - protein, 14 aa, Artificial Sequence
  Description of Artificial Sequence: Synthetic peptide
DLLVCLRNWFCWND

SEQ ID NO: 773 - protein, 14 aa, Artificial Sequence
  Description of Artificial Sequence: Synthetic peptide
HDLFCVRNLWCWNA

SEQ ID NO: 774 - protein, 14 aa, Artificial Sequence
  Description of Artificial Sequence: Synthetic peptide
NLLMCVQNLYCWIA

SEQ ID NO: 775 - protein, 14 aa, Artificial Sequence
  Description of Artificial Sequence: Synthetic peptide
DTLWCVRNLYCWIN

SEQ ID NO: 776 - protein, 14 aa, Artificial Sequence
  Description of Artificial Sequence: Synthetic peptide
NVLVCVNNLWCWID

SEQ ID NO: 777 - protein, 14 aa, Artificial Sequence
  Description of Artificial Sequence: Synthetic peptide
SYLFCFKNLYCWND

SEQ ID NO: 778 - protein, 14 aa, Artificial Sequence
  Description of Artificial Sequence: Synthetic peptide
NNLWCFQNLYCWHV

SEQ ID NO: 779 - protein, 14 aa, Artificial Sequence
  Description of Artificial Sequence: Synthetic peptide
LYLMCVKNLYCWIN

SEQ ID NO: 780 - protein, 14 aa, Artificial Sequence
  Description of Artificial Sequence: Synthetic peptide
NDLICVRNLYCWHY

SEQ ID NO: 781 - protein, 14 aa, Artificial Sequence
  Description of Artificial Sequence: Synthetic peptide
NHLFCVRNLYCWTT

SEQ ID NO: 782 - protein, 14 aa, Artificial Sequence
  Description of Artificial Sequence: Synthetic peptide
NALLCVKNLYCWID

SEQ ID NO: 783 - protein, 14 aa, Artificial Sequence
  Description of Artificial Sequence: Synthetic peptide
LALFCVKNLYCWHD

SEQ ID NO: 784 - protein, 14 aa, Artificial Sequence
  Description of Artificial Sequence: Synthetic peptide
NALVCVYNIYCWHV

SEQ ID NO: 785 - protein, 14 aa, Artificial Sequence
  Description of Artificial Sequence: Synthetic peptide
NNLYCVKNLWCWVA

SEQ ID NO: 786 - protein, 14 aa, Artificial Sequence
  Description of Artificial Sequence: Synthetic peptide
YSLMCVKNLYCWHA

SEQ ID NO: 787 - protein, 14 aa, Artificial Sequence
  Description of Artificial Sequence: Synthetic peptide
NALLCVNNLWCWID

SEQ ID NO: 788 - protein, 14 aa, Artificial Sequence
  Description of Artificial Sequence: Synthetic peptide
DTLLCVHNLFCWID

SEQ ID NO: 789 - protein, 14 aa, Artificial Sequence
  Description of Artificial Sequence: Synthetic peptide
NNLYCFQNVFCWIA

SEQ ID NO: 790 - protein, 14 aa, Artificial Sequence
  Description of Artificial Sequence: Synthetic peptide
ASLMCVKNLYCWHA

SEQ ID NO: 791 - protein, 14 aa, Artificial Sequence
  Description of Artificial Sequence: Synthetic peptide
TALFCFQNVYCWHD

SEQ ID NO: 792 - protein, 14 aa, Artificial Sequence
  Description of Artificial Sequence: Synthetic peptide
NVLVCVQNIYCWVS

SEQ ID NO: 793 - protein, 14 aa, Artificial Sequence
  Description of Artificial Sequence: Synthetic peptide
NNLMCFKNLWCWHI

SEQ ID NO: 794 - protein, 14 aa, Artificial Sequence
  Description of Artificial Sequence: Synthetic peptide
SSLLCVNNLWCWTT

SEQ ID NO: 795 - protein, 14 aa, Artificial Sequence
  Description of Artificial Sequence: Synthetic peptide
NSLFCVMNIYCWHD

SEQ ID NO: 796 - protein, 14 aa, Artificial Sequence
  Description of Artificial Sequence: Synthetic peptide
NHLFCIKNLYCWHA

SEQ ID NO: 797 - protein, 14 aa, Artificial Sequence
  Description of Artificial Sequence: Synthetic peptide
FSLFCVKNLYCWTN

SEQ ID NO: 798 - protein, 14 aa, Artificial Sequence
  Description of Artificial Sequence: Synthetic peptide
NTLFCVQNVFCWTY

SEQ ID NO: 799 - protein, 14 aa, Artificial Sequence
  Description of Artificial Sequence: Synthetic peptide
NALFCFKNLYCWTY

SEQ ID NO: 800 - protein, 14 aa, Artificial Sequence
  Description of Artificial Sequence: Synthetic peptide
NTLLCVKNLYCWID

SEQ ID NO: 801 - protein, 14 aa, Artificial Sequence
  Description of Artificial Sequence: Synthetic peptide
SHLFCFQNLYCWNA

SEQ ID NO: 802 - protein, 14 aa, Artificial Sequence
  Description of Artificial Sequence: Synthetic peptide
YTLFCFQNLYCWNV

SEQ ID NO: 803 - protein, 14 aa, Artificial Sequence
  Description of Artificial Sequence: Synthetic peptide
HSLFCVKNLYCWTI

SEQ ID NO: 804 - protein, 14 aa, Artificial Sequence
  Description of Artificial Sequence: Synthetic peptide
DYLLCFRNLYCWYD

SEQ ID NO: 805 - protein, 14 aa, Artificial Sequence
  Description of Artificial Sequence: Synthetic peptide
YNLFCVRNLYCWVA

SEQ ID NO: 806 - protein, 14 aa, Artificial Sequence
  Description of Artificial Sequence: Synthetic peptide
YSLVCVKNLWCWNI

SEQ ID NO: 807 - protein, 14 aa, Artificial Sequence
  Description of Artificial Sequence: Synthetic peptide
FNLFCVKNLYCWND

SEQ ID NO: 808 - protein, 14 aa, Artificial Sequence
  Description of Artificial Sequence: Synthetic peptide
VALFCVKNIYCWNF

SEQ ID NO: 809 - protein, 14 aa, Artificial Sequence
  Description of Artificial Sequence: Synthetic peptide
DYLLCVHNLFCWIV

SEQ ID NO: 810 - protein, 14 aa, Artificial Sequence
  Description of Artificial Sequence: Synthetic peptide
DTLLCVKNLFCWID

SEQ ID NO: 811 - protein, 14 aa, Artificial Sequence
  Description of Artificial Sequence: Synthetic peptide
DVLVCVNNLFCWID

SEQ ID NO: 812 - protein, 14 aa, Artificial Sequence
  Description of Artificial Sequence: Synthetic peptide
NYLYCVQNVYCWII

SEQ ID NO: 813 - protein, 14 aa, Artificial Sequence
  Description of Artificial Sequence: Synthetic peptide
NSLQCVRNIYCWIN

SEQ ID NO: 814 - protein, 14 aa, Artificial Sequence
  Description of Artificial Sequence: Synthetic peptide
YSLFCVQNLYCWNA

SEQ ID NO: 815 - protein, 14 aa, Artificial Sequence
  Description of Artificial Sequence: Synthetic peptide
FSLFCVKNLYCWNT

SEQ ID NO: 816 - protein, 14 aa, Artificial Sequence
  Description of Artificial Sequence: Synthetic peptide
NNLVCVRNLYCWIA

SEQ ID NO: 817 - protein, 14 aa, Artificial Sequence
  Description of Artificial Sequence: Synthetic peptide
NSLLCVKNIYCWID

SEQ ID NO: 818 - protein, 14 aa, Artificial Sequence
  Description of Artificial Sequence: Synthetic peptide
NFLVCVRNLYCWID

SEQ ID NO: 819 - protein, 14 aa, Artificial Sequence
  Description of Artificial Sequence: Synthetic peptide
HVLFCVRNLYCWTN

SEQ ID NO: 820 - protein, 14 aa, Artificial Sequence
  Description of Artificial Sequence: Synthetic peptide
SILLCYQNLLCWID

SEQ ID NO: 821 - protein, 14 aa, Artificial Sequence
  Description of Artificial Sequence: Synthetic peptide
NFLFCVRNLYCWID

SEQ ID NO: 822 - protein, 14 aa, Artificial Sequence
  Description of Artificial Sequence: Synthetic peptide
DTLVCVKNLLCWTF

SEQ ID NO: 823 - protein, 14 aa, Artificial Sequence
  Description of Artificial Sequence: Synthetic peptide
YSLLCVKNVYCWHI

SEQ ID NO: 824 - protein, 14 aa, Artificial Sequence
  Description of Artificial Sequence: Synthetic peptide
DTLICVRNLYCWIN

SEQ ID NO: 825 - protein, 14 aa, Artificial Sequence
  Description of Artificial Sequence: Synthetic peptide
AHLLCVKNLWCWSV

SEQ ID NO: 826 - protein, 14 aa, Artificial Sequence
  Description of Artificial Sequence: Synthetic peptide
FSLFCVKNVYCWVS

SEQ ID NO: 827 - protein, 14 aa, Artificial Sequence
  Description of Artificial Sequence: Synthetic peptide
DTLFCVRNLWCWNA

SEQ ID NO: 828 - protein, 14 aa, Artificial Sequence
  Description of Artificial Sequence: Synthetic peptide
DTLVCVRNLFCWPI

SEQ ID NO: 829 - protein, 14 aa, Artificial Sequence
  Description of Artificial Sequence: Synthetic peptide
SDLICVKNLWCWHD

SEQ ID NO: 830 - protein, 14 aa, Artificial Sequence
  Description of Artificial Sequence: Synthetic peptide
FHLLCVQNLYCWHD

SEQ ID NO: 831 - protein, 14 aa, Artificial Sequence
  Description of Artificial Sequence: Synthetic peptide
NSLFCVKNVFCWIV

SEQ ID NO: 832 - protein, 14 aa, Artificial Sequence
  Description of Artificial Sequence: Synthetic peptide
DSLVCVKNLFCWVV

SEQ ID NO: 833 - protein, 14 aa, Artificial Sequence
  Description of Artificial Sequence: Synthetic peptide
YVLFCVKNIYCWHV

SEQ ID NO: 834 - protein, 14 aa, Artificial Sequence
  Description of Artificial Sequence: Synthetic peptide
SSLWCVKNLWCYHV

SEQ ID NO: 835 - protein, 14 aa, Artificial Sequence
  Description of Artificial Sequence: Synthetic peptide
NVLFCVQNIYCWND

SEQ ID NO: 836 - protein, 14 aa, Artificial Sequence
  Description of Artificial Sequence: Synthetic peptide
YSLFCVQNLWCWHD

SEQ ID NO: 837 - protein, 14 aa, Artificial Sequence
  Description of Artificial Sequence: Synthetic peptide
FDLFCVRNLYCWNY

SEQ ID NO: 838 - protein, 14 aa, Artificial Sequence
  Description of Artificial Sequence: Synthetic peptide
PALKCVKNLFCWID

SEQ ID NO: 839 - protein, 14 aa, Artificial Sequence
  Description of Artificial Sequence: Synthetic peptide
FSLFCVKNLYCWND

SEQ ID NO: 840 - protein, 14 aa, Artificial Sequence
  Description of Artificial Sequence: Synthetic peptide
ASLLCVKNLWCWHV

SEQ ID NO: 841 - protein, 14 aa, Artificial Sequence
  Description of Artificial Sequence: Synthetic peptide
NSLWCVNNLFCWTD

SEQ ID NO: 842 - protein, 14 aa, Artificial Sequence
  Description of Artificial Sequence: Synthetic peptide
TYLLCFQNLYCWNV

SEQ ID NO: 843 - protein, 14 aa, Artificial Sequence
  Description of Artificial Sequence: Synthetic peptide
FSLFCVQNLYCWTT

SEQ ID NO: 844 - protein, 14 aa, Artificial Sequence
  Description of Artificial Sequence: Synthetic peptide
YALFCVQNLYCWNT

SEQ ID NO: 845 - protein, 14 aa, Artificial Sequence
  Description of Artificial Sequence: Synthetic peptide
NYLVCVNNIHCWIA

SEQ ID NO: 846 - protein, 14 aa, Artificial Sequence
  Description of Artificial Sequence: Synthetic peptide
LSLFCVNNLYCWTA

SEQ ID NO: 847 - protein, 14 aa, Artificial Sequence
  Description of Artificial Sequence: Synthetic peptide
NYLICVKNLYCWID

SEQ ID NO: 848 - protein, 14 aa, Artificial Sequence
  Description of Artificial Sequence: Synthetic peptide
TTLFCVKNVFCWHV

SEQ ID NO: 849 - protein, 14 aa, Artificial Sequence
  Description of Artificial Sequence: Synthetic peptide
FDLFCVRNLYCWNA

SEQ ID NO: 850 - protein, 14 aa, Artificial Sequence
  Description of Artificial Sequence: Synthetic peptide
DVLFCWRNLWCWNN

SEQ ID NO: 851 - protein, 14 aa, Artificial Sequence
  Description of Artificial Sequence: Synthetic peptide
STLVCIRNLYCWND

SEQ ID NO: 852 - protein, 14 aa, Artificial Sequence
  Description of Artificial Sequence: Synthetic peptide
SDLLCYKNLYCWNY

SEQ ID NO: 853 - protein, 14 aa, Artificial Sequence
  Description of Artificial Sequence: Synthetic peptide
LSLFCVQNLYCWHA

SEQ ID NO: 854 - protein, 14 aa, Artificial Sequence
  Description of Artificial Sequence: Synthetic peptide
HYLMCWQNLWCWTV

SEQ ID NO: 855 - protein, 14 aa, Artificial Sequence
  Description of Artificial Sequence: Synthetic peptide
FHLVCWRNLHCWID

SEQ ID NO: 856 - protein, 14 aa, Artificial Sequence
  Description of Artificial Sequence: Synthetic peptide
VDLFCWRNLYCWND

SEQ ID NO: 857 - protein, 14 aa, Artificial Sequence
  Description of Artificial Sequence: Synthetic peptide
TALVCVRNLYCWHV

SEQ ID NO: 858 - protein, 14 aa, Artificial Sequence
  Description of Artificial Sequence: Synthetic peptide
LSLFCVKNLYCWND

SEQ ID NO: 859 - protein, 14 aa, Artificial Sequence
  Description of Artificial Sequence: Synthetic peptide
SSLFCVKNLYCWHA

SEQ ID NO: 860 - protein, 14 aa, Artificial Sequence
  Description of Artificial Sequence: Synthetic peptide
DVLICVHNLFCWTV

SEQ ID NO: 861 - protein, 14 aa, Artificial Sequence
  Description of Artificial Sequence: Synthetic peptide
YALFCVRNLYCWNT

SEQ ID NO: 862 - protein, 14 aa, Artificial Sequence
  Description of Artificial Sequence: Synthetic peptide
ASLFCVKNIYCWTV

SEQ ID NO: 863 - protein, 14 aa, Artificial Sequence
  Description of Artificial Sequence: Synthetic peptide
ADLVCVKNLWCWYD

SEQ ID NO: 864 - protein, 14 aa, Artificial Sequence
  Description of Artificial Sequence: Synthetic peptide
NTLFCFKNVFCWNV

SEQ ID NO: 865 - protein, 14 aa, Artificial Sequence
  Description of Artificial Sequence: Synthetic peptide
YNLFCLQNVYCWTI

SEQ ID NO: 866 - protein, 14 aa, Artificial Sequence
  Description of Artificial Sequence: Synthetic peptide
ATLMCVKNLYCWIN

SEQ ID NO: 867 - protein, 14 aa, Artificial Sequence
  Description of Artificial Sequence: Synthetic peptide
HALLCVENIYCWYA

SEQ ID NO: 868 - protein, 14 aa, Artificial Sequence
  Description of Artificial Sequence: Synthetic peptide
YALFCVNNIYCWTV

SEQ ID NO: 869 - protein, 14 aa, Artificial Sequence
  Description of Artificial Sequence: Synthetic peptide
NTLFCVKNLYCWIV

SEQ ID NO: 870 - protein, 14 aa, Artificial Sequence
  Description of Artificial Sequence: Synthetic peptide
DTLFCVKNLFCWVV

SEQ ID NO: 871 - protein, 14 aa, Artificial Sequence
  Description of Artificial Sequence: Synthetic peptide
NHLVCVRNLWCWNV

SEQ ID NO: 872 - protein, 14 aa, Artificial Sequence
  Description of Artificial Sequence: Synthetic peptide
ASLFCLQNLYCWTA

SEQ ID NO: 873 - protein, 14 aa, Artificial Sequence
  Description of Artificial Sequence: Synthetic peptide
FSLFCFKNLYCWND

SEQ ID NO: 874 - protein, 14 aa, Artificial Sequence
  Description of Artificial Sequence: Synthetic peptide
ASLMCVRNLYCWNA

SEQ ID NO: 875 - protein, 14 aa, Artificial Sequence
  Description of Artificial Sequence: Synthetic peptide
SHLLCFQNLYCWTI

SEQ ID NO: 876 - protein, 14 aa, Artificial Sequence
  Description of Artificial Sequence: Synthetic peptide
FSLFCVQNLWCWND

SEQ ID NO: 877 - protein, 14 aa, Artificial Sequence
  Description of Artificial Sequence: Synthetic peptide
SYLFCVRNLYCWNS

SEQ ID NO: 878 - protein, 14 aa, Artificial Sequence
  Description of Artificial Sequence: Synthetic peptide
FSLFCVQNVFCWTD

SEQ ID NO: 879 - protein, 14 aa, Artificial Sequence
  Description of Artificial Sequence: Synthetic peptide
NHLLCVKNLWCWVV

SEQ ID NO: 880 - protein, 14 aa, Artificial Sequence
  Description of Artificial Sequence: Synthetic peptide
YSLFCVENLYCWNA

SEQ ID NO: 881 - protein, 14 aa, Artificial Sequence
  Description of Artificial Sequence: Synthetic peptide
SHLVCWHNLYCWND

SEQ ID NO: 882 - protein, 14 aa, Artificial Sequence
  Description of Artificial Sequence: Synthetic peptide
HSLFCVKNLYCWTS

SEQ ID NO: 883 - protein, 14 aa, Artificial Sequence
  Description of Artificial Sequence: Synthetic peptide
DLLWCFQNLYCWHV

SEQ ID NO: 884 - protein, 14 aa, Artificial Sequence
  Description of Artificial Sequence: Synthetic peptide
HDLKCFQNLYCWYD

SEQ ID NO: 885 - protein, 14 aa, Artificial Sequence
  Description of Artificial Sequence: Synthetic peptide
NTLLCWHNLYCWVD

SEQ ID NO: 886 - protein, 14 aa, Artificial Sequence
  Description of Artificial Sequence: Synthetic peptide
FDLVCVRNLYCWTV

SEQ ID NO: 887 - protein, 14 aa, Artificial Sequence
  Description of Artificial Sequence: Synthetic peptide
ATLFCVKNLYCWID

SEQ ID NO: 888 - protein, 14 aa, Artificial Sequence
  Description of Artificial Sequence: Synthetic peptide
FALLCFQNVYCWHI

SEQ ID NO: 889 - protein, 14 aa, Artificial Sequence
  Description of Artificial Sequence: Synthetic peptide
SSLFCLQNLYCWTD

SEQ ID NO: 890 - protein, 14 aa, Artificial Sequence
  Description of Artificial Sequence: Synthetic peptide
NALWCVKNLYCWID

SEQ ID NO: 891 - protein, 14 aa, Artificial Sequence
  Description of Artificial Sequence: Synthetic peptide
FALFCVKNVYCWTN

SEQ ID NO: 892 - protein, 14 aa, Artificial Sequence
  Description of Artificial Sequence: Synthetic peptide
SDLFCVKNIYCWHF

SEQ ID NO: 893 - protein, 14 aa, Artificial Sequence
  Description of Artificial Sequence: Synthetic peptide
NHLLCFQNLWCWTV

SEQ ID NO: 894 - protein, 14 aa, Artificial Sequence
  Description of Artificial Sequence: Synthetic peptide
DSLMCWKNLWCWID

SEQ ID NO: 895 - protein, 14 aa, Artificial Sequence
  Description of Artificial Sequence: Synthetic peptide
VVLFCWQNVYCWHS

SEQ ID NO: 896 - protein, 14 aa, Artificial Sequence
  Description of Artificial Sequence: Synthetic peptide
YTLQCFHNLYCWHI

SEQ ID NO: 897 - protein, 14 aa, Artificial Sequence
  Description of Artificial Sequence: Synthetic peptide
YHLLCVKNLYCWIN

SEQ ID NO: 898 - protein, 14 aa, Artificial Sequence
  Description of Artificial Sequence: Synthetic peptide
YFLHCFRNLYCWDT

SEQ ID NO: 899 - protein, 14 aa, Artificial Sequence
  Description of Artificial Sequence: Synthetic peptide
DTLLCVKNLFCWIV

SEQ ID NO: 900 - protein, 14 aa, Artificial Sequence
  Description of Artificial Sequence: Synthetic peptide
TLLHCYKNLYCWHD

SEQ ID NO: 901 - protein, 14 aa, Artificial Sequence
  Description of Artificial Sequence: Synthetic peptide
YLFCIKNLYCWNDG

SEQ ID NO: 902 - protein, 14 aa, Artificial Sequence
  Description of Artificial Sequence: Synthetic peptide
LSLFCFKNLYCWNS

SEQ ID NO: 903 - protein, 14 aa, Artificial Sequence
  Description of Artificial Sequence: Synthetic peptide
YSLFCVRNLYCWND

SEQ ID NO: 904 - protein, 14 aa, Artificial Sequence
  Description of Artificial Sequence: Synthetic peptide
NTLFCVKNIYCWVD

SEQ ID NO: 905 - protein, 14 aa, Artificial Sequence
  Description of Artificial Sequence: Synthetic peptide
DSLFCVMNLYCWTD

SEQ ID NO: 906 - protein, 14 aa, Artificial Sequence
  Description of Artificial Sequence: Synthetic peptide
SSLFCIHNLYCWND

SEQ ID NO: 907 - protein, 14 aa, Artificial Sequence
  Description of Artificial Sequence: Synthetic peptide
SNLVCVRNLYCWIN

SEQ ID NO: 908 - protein, 14 aa, Artificial Sequence
  Description of Artificial Sequence: Synthetic peptide
NSLFCVQNLYCWVD

SEQ ID NO: 909 - protein, 14 aa, Artificial Sequence
  Description of Artificial Sequence: Synthetic peptide
ASLFCVHNLYCWTA

SEQ ID NO: 910 - protein, 14 aa, Artificial Sequence
  Description of Artificial Sequence: Synthetic peptide
FSLVCVKNLWCWTV

SEQ ID NO: 911 - protein, 14 aa, Artificial Sequence
  Description of Artificial Sequence: Synthetic peptide
TDLMCFRNLWCWNT

SEQ ID NO: 912 - protein, 14 aa, Artificial Sequence
  Description of Artificial Sequence: Synthetic peptide
SILLCFQNLYCWTT

SEQ ID NO: 913 - protein, 14 aa, Artificial Sequence
  Description of Artificial Sequence: Synthetic peptide
YDLFCVRNLWCWND

SEQ ID NO: 914 - protein, 14 aa, Artificial Sequence
  Description of Artificial Sequence: Synthetic peptide
SNLMCFRNLYCWLD

SEQ ID NO: 915 - protein, 14 aa, Artificial Sequence
  Description of Artificial Sequence: Synthetic peptide
YSLHCVRNLYCWHD

SEQ ID NO: 916 - protein, 14 aa, Artificial Sequence
  Description of Artificial Sequence: Synthetic peptide
HTLFCVRNLYCWHD

SEQ ID NO: 917 - protein, 14 aa, Artificial Sequence
  Description of Artificial Sequence: Synthetic peptide
NILFCVDNLYCWID

SEQ ID NO: 918 - protein, 14 aa, Artificial Sequence
  Description of Artificial Sequence: Synthetic peptide
ATLMCVMNVYCWYA

SEQ ID NO: 919 - protein, 14 aa, Artificial Sequence
  Description of Artificial Sequence: Synthetic peptide
NALMCVKNVYCWIN

SEQ ID NO: 920 - protein, 14 aa, Artificial Sequence
  Description of Artificial Sequence: Synthetic peptide
DTLVCLRNLFCWIN

SEQ ID NO: 921 - protein, 14 aa, Artificial Sequence
  Description of Artificial Sequence: Synthetic peptide
YALLCLKNIYCWNI

SEQ ID NO: 922 - protein, 14 aa, Artificial Sequence
  Description of Artificial Sequence: Synthetic peptide
NSLVCVMNIYCWHT

SEQ ID NO: 923 - protein, 14 aa, Artificial Sequence
  Description of Artificial Sequence: Synthetic peptide
NVLFCMDNLWCWID

SEQ ID NO: 924 - protein, 14 aa, Artificial Sequence
  Description of Artificial Sequence: Synthetic peptide
HNLVCLQNLYCWND

SEQ ID NO: 925 - protein, 14 aa, Artificial Sequence
  Description of Artificial Sequence: Synthetic peptide
NALMCFKNVYCWID

SEQ ID NO: 926 - protein, 14 aa, Artificial Sequence
  Description of Artificial Sequence: Synthetic peptide
VFLMCVRNLYCWHD

SEQ ID NO: 927 - protein, 14 aa, Artificial Sequence
  Description of Artificial Sequence: Synthetic peptide
DYLVCVRNLYCWIN

SEQ ID NO: 928 - protein, 14 aa, Artificial Sequence
  Description of Artificial Sequence: Synthetic peptide
FSLMCEKNLWCWHV

SEQ ID NO: 929 - protein, 14 aa, Artificial Sequence
  Description of Artificial Sequence: Synthetic peptide
YTLFCVNNIYCWTD

SEQ ID NO: 930 - protein, 14 aa, Artificial Sequence
  Description of Artificial Sequence: Synthetic peptide
NFLVCVKNLYCWID

SEQ ID NO: 931 - protein, 14 aa, Artificial Sequence
  Description of Artificial Sequence: Synthetic peptide
FDLFCVRNLYCWND

SEQ ID NO: 932 - protein, 14 aa, Artificial Sequence
  Description of Artificial Sequence: Synthetic peptide
HTLFCVRNLYCWTI

SEQ ID NO: 933 - protein, 14 aa, Artificial Sequence
  Description of Artificial Sequence: Synthetic peptide
DVLLCVKNLFCWTV

SEQ ID NO: 934 - protein, 14 aa, Artificial Sequence
  Description of Artificial Sequence: Synthetic peptide
NTLVCFQNFFCWID

SEQ ID NO: 935 - protein, 14 aa, Artificial Sequence
  Description of Artificial Sequence: Synthetic peptide
NSLFCVKNLWCWIA

SEQ ID NO: 936 - protein, 14 aa, Artificial Sequence
  Description of Artificial Sequence: Synthetic peptide
FALFCVKNLYCWHI

SEQ ID NO: 937 - protein, 14 aa, Artificial Sequence
  Description of Artificial Sequence: Synthetic peptide
DNLFCIRNLYCWID

SEQ ID NO: 938 - protein, 14 aa, Artificial Sequence
  Description of Artificial Sequence: Synthetic peptide
HSLFCFQNLWCWHD

SEQ ID NO: 939 - protein, 14 aa, Artificial Sequence
  Description of Artificial Sequence: Synthetic peptide
SILWCFQNLYCWHV

SEQ ID NO: 940 - protein, 14 aa, Artificial Sequence
  Description of Artificial Sequence: Synthetic peptide
SDLVCVMNIYCFHT

SEQ ID NO: 941 - protein, 14 aa, Artificial Sequence
  Description of Artificial Sequence: Synthetic peptide
DHLVCWRNVYCWHT

SEQ ID NO: 942 - protein, 14 aa, Artificial Sequence
  Description of Artificial Sequence: Synthetic peptide
FSLFCVKNLYCWTD

SEQ ID NO: 943 - protein, 14 aa, Artificial Sequence
  Description of Artificial Sequence: Synthetic peptide
DHLVCVKNLLCWIV

SEQ ID NO: 944 - protein, 14 aa, Artificial Sequence
  Description of Artificial Sequence: Synthetic peptide
NILLCVKNLYCWND

SEQ ID NO: 945 - protein, 14 aa, Artificial Sequence
  Description of Artificial Sequence: Synthetic peptide
DYLMCVKNLFCWII

SEQ ID NO: 946 - protein, 14 aa, Artificial Sequence
  Description of Artificial Sequence: Synthetic peptide
NFLVCVKNLYCWIS

SEQ ID NO: 947 - protein, 14 aa, Artificial Sequence
  Description of Artificial Sequence: Synthetic peptide
THLLCVMNIYCYHI

SEQ ID NO: 948 - protein, 14 aa, Artificial Sequence
  Description of Artificial Sequence: Synthetic peptide
YTFFCVKNLYCWND

SEQ ID NO: 949 - protein, 14 aa, Artificial Sequence
  Description of Artificial Sequence: Synthetic peptide
DVLFCVQNVYCWHI

SEQ ID NO: 950 - protein, 14 aa, Artificial Sequence
  Description of Artificial Sequence: Synthetic peptide
DLLVCVKNLFCWTV

SEQ ID NO: 951 - protein, 14 aa, Artificial Sequence
  Description of Artificial Sequence: Synthetic peptide
DILFCFQNIYCWHT

SEQ ID NO: 952 - protein, 14 aa, Artificial Sequence
  Description of Artificial Sequence: Synthetic peptide
YNLLCVKNIYCWHD

SEQ ID NO: 953 - protein, 14 aa, Artificial Sequence
  Description of Artificial Sequence: Synthetic peptide
NFLVCWKNTLCWIA

SEQ ID NO: 954 - protein, 14 aa, Artificial Sequence
  Description of Artificial Sequence: Synthetic peptide
DSLFCLRNLYCWTA

SEQ ID NO: 955 - protein, 14 aa, Artificial Sequence
  Description of Artificial Sequence: Synthetic peptide
YSLMCVKNLYCWND

SEQ ID NO: 956 - protein, 14 aa, Artificial Sequence
  Description of Artificial Sequence: Synthetic peptide
DSLFCVRNLFCWTT

SEQ ID NO: 957 - protein, 14 aa, Artificial Sequence
  Description of Artificial Sequence: Synthetic peptide
DALFCIKNLWCWNS

SEQ ID NO: 958 - protein, 14 aa, Artificial Sequence
  Description of Artificial Sequence: Synthetic peptide
NYLICVKNLYCWIN

SEQ ID NO: 959 - protein, 14 aa, Artificial Sequence
  Description of Artificial Sequence: Synthetic peptide
FDLVCVRNLWCWHT

SEQ ID NO: 960 - protein, 14 aa, Artificial Sequence
  Description of Artificial Sequence: Synthetic peptide
YDLLCFKNLWCWNT

SEQ ID NO: 961 - protein, 14 aa, Artificial Sequence
  Description of Artificial Sequence: Synthetic peptide
DFLRCVKNLYCWID

SEQ ID NO: 962 - protein, 14 aa, Artificial Sequence
  Description of Artificial Sequence: Synthetic peptide
NALVCIKNLWCWHV

SEQ ID NO: 963 - protein, 14 aa, Artificial Sequence
  Description of Artificial Sequence: Synthetic peptide
AALVCVKNIYCWIH

SEQ ID NO: 964 - protein, 14 aa, Artificial Sequence
  Description of Artificial Sequence: Synthetic peptide
NSLLCVRNLYCWIA

SEQ ID NO: 965 - protein, 14 aa, Artificial Sequence
  Description of Artificial Sequence: Synthetic peptide
NLLFCFQNLYCWID

SEQ ID NO: 966 - protein, 14 aa, Artificial Sequence
  Description of Artificial Sequence: Synthetic peptide
TTLFCVKNLYCWHA

SEQ ID NO: 967 - protein, 14 aa, Artificial Sequence
  Description of Artificial Sequence: Synthetic peptide
DFMVCVKNLFCWID

SEQ ID NO: 968 - protein, 14 aa, Artificial Sequence
  Description of Artificial Sequence: Synthetic peptide
TSLVCWRNVYCWHD

SEQ ID NO: 969 - protein, 14 aa, Artificial Sequence
  Description of Artificial Sequence: Synthetic peptide
YSLFCVKNLYCWND

SEQ ID NO: 970 - protein, 14 aa, Artificial Sequence
  Description of Artificial Sequence: Synthetic peptide
SYLFCFQNLYCWNI

SEQ ID NO: 971 - protein, 14 aa, Artificial Sequence
  Description of Artificial Sequence: Synthetic peptide
DTLVCIRNLYCWID

SEQ ID NO: 972 - protein, 14 aa, Artificial Sequence
  Description of Artificial Sequence: Synthetic peptide
NTLFCVKNLYCWTA

SEQ ID NO: 973 - protein, 14 aa, Artificial Sequence
  Description of Artificial Sequence: Synthetic peptide
NLLFCINNLFCWND

SEQ ID NO: 974 - protein, 14 aa, Artificial Sequence
  Description of Artificial Sequence: Synthetic peptide
FSLNCVKNIYCWHT

SEQ ID NO: 975 - protein, 14 aa, Artificial Sequence
  Description of Artificial Sequence: Synthetic peptide
HALFCVKNLWCWHD

SEQ ID NO: 976 - protein, 14 aa, Artificial Sequence
  Description of Artificial Sequence: Synthetic peptide
NHLVCFQNVKCWIA

SEQ ID NO: 977 - protein, 14 aa, Artificial Sequence
  Description of Artificial Sequence: Synthetic peptide
NDLFCVQNIWCWHD

SEQ ID NO: 978 - protein, 14 aa, Artificial Sequence
  Description of Artificial Sequence: Synthetic peptide
NDLICVKNLWCWHT

SEQ ID NO: 979 - protein, 14 aa, Artificial Sequence
  Description of Artificial Sequence: Synthetic peptide
DTLVCVRNLFCWIY

SEQ ID NO: 980 - protein, 14 aa, Artificial Sequence
  Description of Artificial Sequence: Synthetic peptide
YILHCFRNLYCWNT

SEQ ID NO: 981 - protein, 14 aa, Artificial Sequence
  Description of Artificial Sequence: Synthetic peptide
HVLLCWRNVYCWHS

SEQ ID NO: 982 - protein, 14 aa, Artificial Sequence
  Description of Artificial Sequence: Synthetic peptide
FALFCVRNIYCWHA

SEQ ID NO: 983 - protein, 14 aa, Artificial Sequence
  Description of Artificial Sequence: Synthetic peptide
NTLMCVKNIYCWII

SEQ ID NO: 984 - protein, 14 aa, Artificial Sequence
  Description of Artificial Sequence: Synthetic peptide
YSLFCVHNLYCWHV

SEQ ID NO: 985 - protein, 14 aa, Artificial Sequence
  Description of Artificial Sequence: Synthetic peptide
NTLVCVRNLYCWIH

SEQ ID NO: 986 - protein, 14 aa, Artificial Sequence
  Description of Artificial Sequence: Synthetic peptide
NNLFCVKNLYCWTA

SEQ ID NO: 987 - protein, 14 aa, Artificial Sequence
  Description of Artificial Sequence: Synthetic peptide
SDLFCVRNLYCWHY

SEQ ID NO: 988 - protein, 14 aa, Artificial Sequence
  Description of Artificial Sequence: Synthetic peptide
HALFCVKNLYCWTA

SEQ ID NO: 989 - protein, 14 aa, Artificial Sequence
  Description of Artificial Sequence: Synthetic peptide
DTLLCVRNLWCWID

SEQ ID NO: 990 - protein, 14 aa, Artificial Sequence
  Description of Artificial Sequence: Synthetic peptide
DSLLCVKNLFCWIV

SEQ ID NO: 991 - protein, 14 aa, Artificial Sequence
  Description of Artificial Sequence: Synthetic peptide
DHLVCVRNLFCWIT

SEQ ID NO: 992 - protein, 14 aa, Artificial Sequence
  Description of Artificial Sequence: Synthetic peptide
DTLLCVKNLFCWTY

SEQ ID NO: 993 - protein, 14 aa, Artificial Sequence
  Description of Artificial Sequence: Synthetic peptide
DSLFCVKNLFCWPV

SEQ ID NO: 994 - protein, 14 aa, Artificial Sequence
  Description of Artificial Sequence: Synthetic peptide
YDLFCWKNLYCWNT

SEQ ID NO: 995 - protein, 14 aa, Artificial Sequence
  Description of Artificial Sequence: Synthetic peptide
NDLFCVRNLYCWNA

SEQ ID NO: 996 - protein, 14 aa, Artificial Sequence
  Description of Artificial Sequence: Synthetic peptide
NILFCFQNLYCWHA

SEQ ID NO: 997 - protein, 14 aa, Artificial Sequence
  Description of Artificial Sequence: Synthetic peptide
SHLLCVKNIFCWTA

SEQ ID NO: 998 - protein, 14 aa, Artificial Sequence
  Description of Artificial Sequence: Synthetic peptide
YALFCLKNLYCWNV

SEQ ID NO: 999 - protein, 14 aa, Artificial Sequence
  Description of Artificial Sequence: Synthetic peptide
NALMCVKNLYCWIH

SEQ ID NO: 1000 - protein, 14 aa, Artificial Sequence
  Description of Artificial Sequence: Synthetic peptide
ANLLCFHNLWCWHD

SEQ ID NO: 1001 - protein, 14 aa, Artificial Sequence
  Description of Artificial Sequence: Synthetic peptide
FSLFCVQNVYCWTS

SEQ ID NO: 1002 - protein, 14 aa, Artificial Sequence
  Description of Artificial Sequence: Synthetic peptide
LHLFCVKNLYCWHA

SEQ ID NO: 1003 - protein, 14 aa, Artificial Sequence
  Description of Artificial Sequence: Synthetic peptide
HNLICVKNLWCWHN

SEQ ID NO: 1004 - protein, 14 aa, Artificial Sequence
  Description of Artificial Sequence: Synthetic peptide
NTLVCFNNLYCYID

SEQ ID NO: 1005 - protein, 14 aa, Artificial Sequence
  Description of Artificial Sequence: Synthetic peptide
FSLFCVNNLWCWND

SEQ ID NO: 1006 - protein, 14 aa, Artificial Sequence
  Description of Artificial Sequence: Synthetic peptide
SYLFCVKNIYCWNF

SEQ ID NO: 1007 - protein, 14 aa, Artificial Sequence
  Description of Artificial Sequence: Synthetic peptide
HSLFCVKNLYCWTA

SEQ ID NO: 1008 - protein, 14 aa, Artificial Sequence
  Description of Artificial Sequence: Synthetic peptide
LSLFCVRNLYCWTA

SEQ ID NO: 1009 - protein, 14 aa, Artificial Sequence
  Description of Artificial Sequence: Synthetic peptide
AALICVKNLYCWNT

SEQ ID NO: 1010 - protein, 14 aa, Artificial Sequence
  Description of Artificial Sequence: Synthetic peptide
SSLWCFQNVYCWVV

SEQ ID NO: 1011 - protein, 14 aa, Artificial Sequence
  Description of Artificial Sequence: Synthetic peptide
AVLWCFQNVYCWNI

SEQ ID NO: 1012 - protein, 14 aa, Artificial Sequence
  Description of Artificial Sequence: Synthetic peptide
NSLFCVRNLYCWIA

SEQ ID NO: 1013 - protein, 14 aa, Artificial Sequence
  Description of Artificial Sequence: Synthetic peptide
YYLNCIKNLYCWTD

SEQ ID NO: 1014 - protein, 14 aa, Artificial Sequence
  Description of Artificial Sequence: Synthetic peptide
YSLFCLRNLYCWTD

SEQ ID NO: 1015 - protein, 14 aa, Artificial Sequence
  Description of Artificial Sequence: Synthetic peptide
FALFCVNNLYCWTS

SEQ ID NO: 1016 - protein, 14 aa, Artificial Sequence
  Description of Artificial Sequence: Synthetic peptide
NFLKCFQNVYCWHV

SEQ ID NO: 1017 - protein, 14 aa, Artificial Sequence
  Description of Artificial Sequence: Synthetic peptide
DSLMCLRNLFCWTY

SEQ ID NO: 1018 - protein, 14 aa, Artificial Sequence
  Description of Artificial Sequence: Synthetic peptide
NYLVCVKNIYCWIH

SEQ ID NO: 1019 - protein, 14 aa, Artificial Sequence
  Description of Artificial Sequence: Synthetic peptide
YSLVCVKNLYCWNV

SEQ ID NO: 1020 - protein, 14 aa, Artificial Sequence
  Description of Artificial Sequence: Synthetic peptide
SFLWCFQNLYCWND

SEQ ID NO: 1021 - protein, 14 aa, Artificial Sequence
  Description of Artificial Sequence: Synthetic peptide
NTLFCVRNLYCWID

SEQ ID NO: 1022 - protein, 14 aa, Artificial Sequence
  Description of Artificial Sequence: Synthetic peptide
DSLRCVNNLYCWID

SEQ ID NO: 1023 - protein, 14 aa, Artificial Sequence
  Description of Artificial Sequence: Synthetic peptide
ADLVCIMNIYCYNT

SEQ ID NO: 1024 - protein, 14 aa, Artificial Sequence
  Description of Artificial Sequence: Synthetic peptide
NNLVCVKNIYCWIF

SEQ ID NO: 1025 - protein, 14 aa, Artificial Sequence
  Description of Artificial Sequence: Synthetic peptide
SDLMCLNNLWCWHT

SEQ ID NO: 1026 - protein, 14 aa, Artificial Sequence
  Description of Artificial Sequence: Synthetic peptide
NFLWCVKNLWCWTS

SEQ ID NO: 1027 - protein, 14 aa, Artificial Sequence
  Description of Artificial Sequence: Synthetic peptide
YLVFCVDKRKCMVL

SEQ ID NO: 1028 - protein, 14 aa, Artificial Sequence
  Description of Artificial Sequence: Synthetic peptide
AALFCWKNLYCWHI

SEQ ID NO: 1029 - protein, 14 aa, Artificial Sequence
  Description of Artificial Sequence: Synthetic peptide
DLLLCFRNLWCWHV

SEQ ID NO: 1030 - protein, 14 aa, Artificial Sequence
  Description of Artificial Sequence: Synthetic peptide
DVLVCLRNLFCWID

SEQ ID NO: 1031 - protein, 14 aa, Artificial Sequence
  Description of Artificial Sequence: Synthetic peptide
FSLHCVMNLYCWHV

SEQ ID NO: 1032 - protein, 14 aa, Artificial Sequence
  Description of Artificial Sequence: Synthetic peptide
NALICVKNLWCWNT

SEQ ID NO: 1033 - protein, 14 aa, Artificial Sequence
  Description of Artificial Sequence: Synthetic peptide
SDLFCFRNLYCWHD

SEQ ID NO: 1034 - protein, 14 aa, Artificial Sequence
  Description of Artificial Sequence: Synthetic peptide
DALVCVKNLFCWID

SEQ ID NO: 1035 - protein, 14 aa, Artificial Sequence
  Description of Artificial Sequence: Synthetic peptide
NFLMCFHNLYCWIN

SEQ ID NO: 1036 - protein, 14 aa, Artificial Sequence
  Description of Artificial Sequence: Synthetic peptide
ASLYCVQNLFCWHS

SEQ ID NO: 1037 - protein, 14 aa, Artificial Sequence
  Description of Artificial Sequence: Synthetic peptide
NSLFCVRNLYCWTD

SEQ ID NO: 1038 - protein, 14 aa, Artificial Sequence
  Description of Artificial Sequence: Synthetic peptide
NHLMCIKNLYCWID

SEQ ID NO: 1039 - protein, 14 aa, Artificial Sequence
  Description of Artificial Sequence: Synthetic peptide
NHLFCINNLYCWHS

SEQ ID NO: 1040 - protein, 14 aa, Artificial Sequence
  Description of Artificial Sequence: Synthetic peptide
FSLFCIKNLYCWHT

SEQ ID NO: 1041 - protein, 14 aa, Artificial Sequence
  Description of Artificial Sequence: Synthetic peptide
NALFCMENLYCWID

SEQ ID NO: 1042 - protein, 14 aa, Artificial Sequence
  Description of Artificial Sequence: Synthetic peptide
SALFCFQNLYCWHF

SEQ ID NO: 1043 - protein, 14 aa, Artificial Sequence
  Description of Artificial Sequence: Synthetic peptide
DSLVCVRNLLCWIV

SEQ ID NO: 1044 - protein, 14 aa, Artificial Sequence
  Description of Artificial Sequence: Synthetic peptide
LALFCLQNIYCWHS

SEQ ID NO: 1045 - protein, 14 aa, Artificial Sequence
  Description of Artificial Sequence: Synthetic peptide
YTLMCVKNLYCWHV

SEQ ID NO: 1046 - protein, 14 aa, Artificial Sequence
  Description of Artificial Sequence: Synthetic peptide
DTLWCVHNVYCWII

SEQ ID NO: 1047 - protein, 14 aa, Artificial Sequence
  Description of Artificial Sequence: Synthetic peptide
NSLFCVKNIYCWNI

SEQ ID NO: 1048 - protein, 14 aa, Artificial Sequence
  Description of Artificial Sequence: Synthetic peptide
NDLLCFRNLWCWYD

SEQ ID NO: 1049 - protein, 14 aa, Artificial Sequence
  Description of Artificial Sequence: Synthetic peptide
TDLLCFRNLWCWHS

SEQ ID NO: 1050 - protein, 14 aa, Artificial Sequence
  Description of Artificial Sequence: Synthetic peptide
NTLLCLNNLFCWID

SEQ ID NO: 1051 - protein, 14 aa, Artificial Sequence
  Description of Artificial Sequence: Synthetic peptide
SHLFCLRNLYCWHV

SEQ ID NO: 1052 - protein, 14 aa, Artificial Sequence
  Description of Artificial Sequence: Synthetic peptide
NVLFCFQNIYCWNF

SEQ ID NO: 1053 - protein, 14 aa, Artificial Sequence
  Description of Artificial Sequence: Synthetic peptide
VHLMCVKNLWCWHA

SEQ ID NO: 1054 - protein, 14 aa, Artificial Sequence
  Description of Artificial Sequence: Synthetic peptide
DLLVCVRNLFCWID

SEQ ID NO: 1055 - protein, 14 aa, Artificial Sequence
  Description of Artificial Sequence: Synthetic peptide
NTLLCVKNLYCWIV

SEQ ID NO: 1056 - protein, 14 aa, Artificial Sequence
  Description of Artificial Sequence: Synthetic peptide
DTLICVRNLYCWID

SEQ ID NO: 1057 - protein, 14 aa, Artificial Sequence
  Description of Artificial Sequence: Synthetic peptide
YALFCVRNLYCYNA

SEQ ID NO: 1058 - protein, 14 aa, Artificial Sequence
  Description of Artificial Sequence: Synthetic peptide
NALVCFQNIYCWID

SEQ ID NO: 1059 - protein, 14 aa, Artificial Sequence
  Description of Artificial Sequence: Synthetic peptide
NALFCVKNIFCWNS

SEQ ID NO: 1060 - protein, 14 aa, Artificial Sequence
  Description of Artificial Sequence: Synthetic peptide
STLFCWRNLVCWTA

SEQ ID NO: 1061 - protein, 14 aa, Artificial Sequence
  Description of Artificial Sequence: Synthetic peptide
NDLLCFQNLWCWHA

SEQ ID NO: 1062 - protein, 14 aa, Artificial Sequence
  Description of Artificial Sequence: Synthetic peptide
NFLVCVKNFYCWID

SEQ ID NO: 1063 - protein, 14 aa, Artificial Sequence
  Description of Artificial Sequence: Synthetic peptide
SILMCVKNLWCWID

SEQ ID NO: 1064 - protein, 14 aa, Artificial Sequence
  Description of Artificial Sequence: Synthetic peptide
DHLFCFRNLWCWNI

SEQ ID NO: 1065 - protein, 14 aa, Artificial Sequence
  Description of Artificial Sequence: Synthetic peptide
YDLICFRNIWCWND

SEQ ID NO: 1066 - protein, 14 aa, Artificial Sequence
  Description of Artificial Sequence: Synthetic peptide
DALFCVKNLFCWTY

SEQ ID NO: 1067 - protein, 14 aa, Artificial Sequence
  Description of Artificial Sequence: Synthetic peptide
NDLICVKNIYCWHF

SEQ ID NO: 1068 - protein, 14 aa, Artificial Sequence
  Description of Artificial Sequence: Synthetic peptide
FSLFCVKNLYCWNA

SEQ ID NO: 1069 - protein, 14 aa, Artificial Sequence
  Description of Artificial Sequence: Synthetic peptide
IFALCWLKLWCLIN

SEQ ID NO: 1070 - protein, 14 aa, Artificial Sequence
  Description of Artificial Sequence: Synthetic peptide
DTLFCLRNVLCWTI

SEQ ID NO: 1071 - protein, 14 aa, Artificial Sequence
  Description of Artificial Sequence: Synthetic peptide
ATLQCFKNIYCWII

SEQ ID NO: 1072 - protein, 14 aa, Artificial Sequence
  Description of Artificial Sequence: Synthetic peptide
HSLFCIQNLWCWNH

SEQ ID NO: 1073 - protein, 14 aa, Artificial Sequence
  Description of Artificial Sequence: Synthetic peptide
SALYCFRNVFCWHV

SEQ ID NO: 1074 - protein, 14 aa, Artificial Sequence
  Description of Artificial Sequence: Synthetic peptide
DSLVCVKNLLCWIY

SEQ ID NO: 1075 - protein, 14 aa, Artificial Sequence
  Description of Artificial Sequence: Synthetic peptide
AVLYCFQNIYCWHI

SEQ ID NO: 1076 - protein, 14 aa, Artificial Sequence
  Description of Artificial Sequence: Synthetic peptide
SDLFCWRNLWCWND

SEQ ID NO: 1077 - protein, 14 aa, Artificial Sequence
  Description of Artificial Sequence: Synthetic peptide
ASLFCVKNLYCWTS

SEQ ID NO: 1078 - protein, 14 aa, Artificial Sequence
  Description of Artificial Sequence: Synthetic peptide
DALMCVKNLLCWIV

SEQ ID NO: 1079 - protein, 14 aa, Artificial Sequence
  Description of Artificial Sequence: Synthetic peptide
DTLRCVMNIYCWID

SEQ ID NO: 1080 - protein, 14 aa, Artificial Sequence
  Description of Artificial Sequence: Synthetic peptide
DTLFCVKNLFCWTY

SEQ ID NO: 1081 - protein, 14 aa, Artificial Sequence
  Description of Artificial Sequence: Synthetic peptide
FSLFCVNNVYCWTD

SEQ ID NO: 1082 - protein, 14 aa, Artificial Sequence
  Description of Artificial Sequence: Synthetic peptide
NSLMCVMNLYCWTI

SEQ ID NO: 1083 - protein, 14 aa, Artificial Sequence
  Description of Artificial Sequence: Synthetic peptide
HILFCQHKRACQIS

SEQ ID NO: 1084 - protein, 14 aa, Artificial Sequence
  Description of Artificial Sequence: Synthetic peptide
DHLMCVNNWFCWIN

SEQ ID NO: 1085 - protein, 14 aa, Artificial Sequence
  Description of Artificial Sequence: Synthetic peptide
DSLFCFRNLWCWVI

SEQ ID NO: 1086 - protein, 14 aa, Artificial Sequence
  Description of Artificial Sequence: Synthetic peptide
SSLMCVRNVYCWIN

SEQ ID NO: 1087 - protein, 14 aa, Artificial Sequence
  Description of Artificial Sequence: Synthetic peptide
YHLFCVKNIYCWHV

SEQ ID NO: 1088 - protein, 14 aa, Artificial Sequence
  Description of Artificial Sequence: Synthetic peptide
DSLFCIRNLFCWTA

SEQ ID NO: 1089 - protein, 14 aa, Artificial Sequence
  Description of Artificial Sequence: Synthetic peptide
NTLLCWHNLYCWIN

SEQ ID NO: 1090 - protein, 14 aa, Artificial Sequence
  Description of Artificial Sequence: Synthetic peptide
TALICVKNLYCWID

SEQ ID NO: 1091 - protein, 14 aa, Artificial Sequence
  Description of Artificial Sequence: Synthetic peptide
FSLLCFQNIYCWTV

SEQ ID NO: 1092 - protein, 14 aa, Artificial Sequence
  Description of Artificial Sequence: Synthetic peptide
DTLHCVKNIFCWTD

SEQ ID NO: 1093 - protein, 14 aa, Artificial Sequence
  Description of Artificial Sequence: Synthetic peptide
NTLVCFKNVHCWID

SEQ ID NO: 1094 - protein, 14 aa, Artificial Sequence
  Description of Artificial Sequence: Synthetic peptide
SNLLCVMNIYCWHV

SEQ ID NO: 1095 - protein, 14 aa, Artificial Sequence
  Description of Artificial Sequence: Synthetic peptide
ASLICVNNLYCWID

SEQ ID NO: 1096 - protein, 14 aa, Artificial Sequence
  Description of Artificial Sequence: Synthetic peptide
NDLVCVKNLWCWNS

SEQ ID NO: 1097 - protein, 14 aa, Artificial Sequence
  Description of Artificial Sequence: Synthetic peptide
HFLMCVHNVFCWIS

SEQ ID NO: 1098 - protein, 14 aa, Artificial Sequence
  Description of Artificial Sequence: Synthetic peptide
ATPSCVQNVQCYIV

SEQ ID NO: 1099 - protein, 14 aa, Artificial Sequence
  Description of Artificial Sequence: Synthetic peptide
THLFCVRNLYCWHA

SEQ ID NO: 1100 - protein, 14 aa, Artificial Sequence
  Description of Artificial Sequence: Synthetic peptide
YDLFCIRNIYCWTY

SEQ ID NO: 1101 - protein, 14 aa, Artificial Sequence
  Description of Artificial Sequence: Synthetic peptide
FDLLCVKNIYCWHD

SEQ ID NO: 1102 - protein, 14 aa, Artificial Sequence
  Description of Artificial Sequence: Synthetic peptide
DSLYCVKNLFCWTF

SEQ ID NO: 1103 - protein, 14 aa, Artificial Sequence
  Description of Artificial Sequence: Synthetic peptide
NHLVCVKNLWCWIY

SEQ ID NO: 1104 - protein, 14 aa, Artificial Sequence
  Description of Artificial Sequence: Synthetic peptide
NHLVCVRNLYCWIT

SEQ ID NO: 1105 - protein, 14 aa, Artificial Sequence
  Description of Artificial Sequence: Synthetic peptide
SFLVCVKNLYCWTD

SEQ ID NO: 1106 - protein, 14 aa, Artificial Sequence
  Description of Artificial Sequence: Synthetic peptide
HSLFCVRNLYCWNA

SEQ ID NO: 1107 - protein, 14 aa, Artificial Sequence
  Description of Artificial Sequence: Synthetic peptide
NVLYCVKNIYCWNS

SEQ ID NO: 1108 - protein, 14 aa, Artificial Sequence
  Description of Artificial Sequence: Synthetic peptide
DYLFCFQNVYCWIA

SEQ ID NO: 1109 - protein, 14 aa, Artificial Sequence
  Description of Artificial Sequence: Synthetic peptide
NYLFCLRNLYCWTA

SEQ ID NO: 1110 - protein, 14 aa, Artificial Sequence
  Description of Artificial Sequence: Synthetic peptide
LSLFCWHNLYCWNI

SEQ ID NO: 1111 - protein, 14 aa, Artificial Sequence
  Description of Artificial Sequence: Synthetic peptide
NTLFCFQNLYCWIN

SEQ ID NO: 1112 - protein, 14 aa, Artificial Sequence
  Description of Artificial Sequence: Synthetic peptide
FSLFCVNNLWCWTD

SEQ ID NO: 1113 - protein, 14 aa, Artificial Sequence
  Description of Artificial Sequence: Synthetic peptide
FSLFCLNNLYCWNA

SEQ ID NO: 1114 - protein, 14 aa, Artificial Sequence
  Description of Artificial Sequence: Synthetic peptide
YSLMCVKNLWCWND

SEQ ID NO: 1115 - protein, 14 aa, Artificial Sequence
  Description of Artificial Sequence: Synthetic peptide
NALWCVKNVYCWTS

SEQ ID NO: 1116 - protein, 14 aa, Artificial Sequence
  Description of Artificial Sequence: Synthetic peptide
NPLQCSWKYQCQVF

SEQ ID NO: 1117 - protein, 14 aa, Artificial Sequence
  Description of Artificial Sequence: Synthetic peptide
NHLFCVMNIYCWNT

SEQ ID NO: 1118 - protein, 14 aa, Artificial Sequence
  Description of Artificial Sequence: Synthetic peptide
NHLHCVMNVYCWIV

SEQ ID NO: 1119 - protein, 14 aa, Artificial Sequence
  Description of Artificial Sequence: Synthetic peptide
FDLICWKNLWCWND

SEQ ID NO: 1120 - protein, 14 aa, Artificial Sequence
  Description of Artificial Sequence: Synthetic peptide
SFLQCLMNIYCWHD

SEQ ID NO: 1121 - protein, 14 aa, Artificial Sequence
  Description of Artificial Sequence: Synthetic peptide
YSLFCLKNLYCWNV

SEQ ID NO: 1122 - protein, 14 aa, Artificial Sequence
  Description of Artificial Sequence: Synthetic peptide
NALFCVRNLYCWTT

SEQ ID NO: 1123 - protein, 14 aa, Artificial Sequence
  Description of Artificial Sequence: Synthetic peptide
SDLFCFRNLWCWNS

SEQ ID NO: 1124 - protein, 14 aa, Artificial Sequence
  Description of Artificial Sequence: Synthetic peptide
VVLVCLKNLQCFDD

SEQ ID NO: 1125 - protein, 14 aa, Artificial Sequence
  Description of Artificial Sequence: Synthetic peptide
ADLLCWRNLWCWSA

SEQ ID NO: 1126 - protein, 14 aa, Artificial Sequence
  Description of Artificial Sequence: Synthetic peptide
FSLFCVKNIYCWVA

SEQ ID NO: 1127 - protein, 14 aa, Artificial Sequence
  Description of Artificial Sequence: Synthetic peptide
DSLFCIKNVFCWTY

SEQ ID NO: 1128 - protein, 14 aa, Artificial Sequence
  Description of Artificial Sequence: Synthetic peptide
STLYCIKNIWCWNV

SEQ ID NO: 1129 - protein, 14 aa, Artificial Sequence
  Description of Artificial Sequence: Synthetic peptide
YSLFCVKNVYCWTS

SEQ ID NO: 1130 - protein, 14 aa, Artificial Sequence
  Description of Artificial Sequence: Synthetic peptide
NTLICVRNLYCWVY

SEQ ID NO: 1131 - protein, 14 aa, Artificial Sequence
  Description of Artificial Sequence: Synthetic peptide
DNLVCVKNLFCWIV

SEQ ID NO: 1132 - protein, 14 aa, Artificial Sequence
  Description of Artificial Sequence: Synthetic peptide
DSLWCVRNLYCWIV

SEQ ID NO: 1133 - protein, 14 aa, Artificial Sequence
  Description of Artificial Sequence: Synthetic peptide
DYLHCVRNLFCWIT

SEQ ID NO: 1134 - protein, 14 aa, Artificial Sequence
  Description of Artificial Sequence: Synthetic peptide
HILSCWHNIYCWYD

SEQ ID NO: 1135 - protein, 14 aa, Artificial Sequence
  Description of Artificial Sequence: Synthetic peptide
YSLFCLRNLYCWNY

SEQ ID NO: 1136 - protein, 14 aa, Artificial Sequence
  Description of Artificial Sequence: Synthetic peptide
SPYLCKQKQLCGSI

SEQ ID NO: 1137 - protein, 14 aa, Artificial Sequence
  Description of Artificial Sequence: Synthetic peptide
FSLFCVKNVYCWTA

SEQ ID NO: 1138 - protein, 14 aa, Artificial Sequence
  Description of Artificial Sequence: Synthetic peptide
NALFCVRNLYCWIS

SEQ ID NO: 1139 - protein, 14 aa, Artificial Sequence
  Description of Artificial Sequence: Synthetic peptide
YSLFCVKNLWCWNA

SEQ ID NO: 1140 - protein, 14 aa, Artificial Sequence
  Description of Artificial Sequence: Synthetic peptide
YSLFCVKNLWCWTD

SEQ ID NO: 1141 - protein, 14 aa, Artificial Sequence
  Description of Artificial Sequence: Synthetic peptide
NHPQCVNKLQCWDH

SEQ ID NO: 1142 - protein, 14 aa, Artificial Sequence
  Description of Artificial Sequence: Synthetic peptide
HDLFCFRNLWCWTV

SEQ ID NO: 1143 - protein, 14 aa, Artificial Sequence
  Description of Artificial Sequence: Synthetic peptide
AYLLCVMNLWCTNV

SEQ ID NO: 1144 - protein, 14 aa, Artificial Sequence
  Description of Artificial Sequence: Synthetic peptide
YALYCFQNLWCWHN

SEQ ID NO: 1145 - protein, 14 aa, Artificial Sequence
  Description of Artificial Sequence: Synthetic peptide
DHLWCFRNLWCWTI

SEQ ID NO: 1146 - protein, 14 aa, Artificial Sequence
  Description of Artificial Sequence: Synthetic peptide
DTLWCVRNLFCWTT

SEQ ID NO: 1147 - protein, 14 aa, Artificial Sequence
  Description of Artificial Sequence: Synthetic peptide
HTLWCFRNLYCWNI

SEQ ID NO: 1148 - protein, 14 aa, Artificial Sequence
  Description of Artificial Sequence: Synthetic peptide
HSLFCVHNLWCWTI

SEQ ID NO: 1149 - protein, 14 aa, Artificial Sequence
  Description of Artificial Sequence: Synthetic peptide
NYLLCFHNLYCWIS

SEQ ID NO: 1150 - protein, 14 aa, Artificial Sequence
  Description of Artificial Sequence: Synthetic peptide
VVLVCVDHRQCWHD

SEQ ID NO: 1151 - protein, 14 aa, Artificial Sequence
  Description of Artificial Sequence: Synthetic peptide
NSLFCVNNIYCWNA

SEQ ID NO: 1152 - protein, 14 aa, Artificial Sequence
  Description of Artificial Sequence: Synthetic peptide
SHLWCFRNIWCWVT

SEQ ID NO: 1153 - protein, 14 aa, Artificial Sequence
  Description of Artificial Sequence: Synthetic peptide
FSLFCVKNLYCWNS

SEQ ID NO: 1154 - protein, 14 aa, Artificial Sequence
  Description of Artificial Sequence: Synthetic peptide
LLPVLCQEYVVCGR

SEQ ID NO: 1155 - protein, 14 aa, Artificial Sequence
  Description of Artificial Sequence: Synthetic peptide
SYLFCFQNVYCWNV

SEQ ID NO: 1156 - protein, 14 aa, Artificial Sequence
  Description of Artificial Sequence: Synthetic peptide
HNLLCGQKLYCYDL

SEQ ID NO: 1157 - protein, 14 aa, Artificial Sequence
  Description of Artificial Sequence: Synthetic peptide
DHRYCVNDQQCWVP

SEQ ID NO: 1158 - protein, 14 aa, Artificial Sequence
  Description of Artificial Sequence: Synthetic peptide
HALFCLKNLWCWNI

SEQ ID NO: 1159 - protein, 14 aa, Artificial Sequence
  Description of Artificial Sequence: Synthetic peptide
YHLFCFRNVYCWHV

SEQ ID NO: 1160 - protein, 14 aa, Artificial Sequence
  Description of Artificial Sequence: Synthetic peptide
TFLWCFQNVYCWNA

SEQ ID NO: 1161 - protein, 14 aa, Artificial Sequence
  Description of Artificial Sequence: Synthetic peptide
FSLFCFQNLWCWNS

SEQ ID NO: 1162 - protein, 14 aa, Artificial Sequence
  Description of Artificial Sequence: Synthetic peptide
LILFCVTNLQCSIH

SEQ ID NO: 1163 - protein, 14 aa, Artificial Sequence
  Description of Artificial Sequence: Synthetic peptide
DYLMCLRNVFCWTV

SEQ ID NO: 1164 - protein, 14 aa, Artificial Sequence
  Description of Artificial Sequence: Synthetic peptide
DAFQCGERLQCWND

SEQ ID NO: 1165 - protein, 14 aa, Artificial Sequence
  Description of Artificial Sequence: Synthetic peptide
HSLFCVRNLWCWTV

SEQ ID NO: 1166 - protein, 14 aa, Artificial Sequence
  Description of Artificial Sequence: Synthetic peptide
LDLICVKNLYCWIN

SEQ ID NO: 1167 - protein, 14 aa, Artificial Sequence
  Description of Artificial Sequence: Synthetic peptide
FDLFCRRKLWCPVN

SEQ ID NO: 1168 - protein, 14 aa, Artificial Sequence
  Description of Artificial Sequence: Synthetic peptide
YTLFCWRNVHCWHI

SEQ ID NO: 1169 - protein, 14 aa, Artificial Sequence
  Description of Artificial Sequence: Synthetic peptide
SHLWCFRNLYCWDV

SEQ ID NO: 1170 - protein, 14 aa, Artificial Sequence
  Description of Artificial Sequence: Synthetic peptide
DTLFCVRNIYCWHI

SEQ ID NO: 1171 - protein, 14 aa, Artificial Sequence
  Description of Artificial Sequence: Synthetic peptide
HNLLCWRNIYCWID

SEQ ID NO: 1172 - protein, 14 aa, Artificial Sequence
  Description of Artificial Sequence: Synthetic peptide
DILFCLRNVFCWTA

SEQ ID NO: 1173 - protein, 14 aa, Artificial Sequence
  Description of Artificial Sequence: Synthetic peptide
PVVLCLHKHQCLSY

SEQ ID NO: 1174 - protein, 14 aa, Artificial Sequence
  Description of Artificial Sequence: Synthetic peptide
NILLCVNKMQCFYH

SEQ ID NO: 1175 - protein, 14 aa, Artificial Sequence
  Description of Artificial Sequence: Synthetic peptide
ADLWCVRNLYCWII

SEQ ID NO: 1176 - protein, 14 aa, Artificial Sequence
  Description of Artificial Sequence: Synthetic peptide
HVLFCWHNVYCWHT

SEQ ID NO: 1177 - protein, 14 aa, Artificial Sequence
  Description of Artificial Sequence: Synthetic peptide
AFLMCWHNLYCWHT

SEQ ID NO: 1178 - protein, 14 aa, Artificial Sequence
  Description of Artificial Sequence: Synthetic peptide
VILLCSDQLYCKDT

SEQ ID NO: 1179 - protein, 14 aa, Artificial Sequence
  Description of Artificial Sequence: Synthetic peptide
VYLFCVQELKCWFS

SEQ ID NO: 1180 - protein, 14 aa, Artificial Sequence
  Description of Artificial Sequence: Synthetic peptide
IHLWCFRNVYCWHV

SEQ ID NO: 1181 - protein, 14 aa, Artificial Sequence
  Description of Artificial Sequence: Synthetic peptide
DILFCWRNLYCWTS

SEQ ID NO: 1182 - protein, 14 aa, Artificial Sequence
  Description of Artificial Sequence: Synthetic peptide
FDLFCVRNLWCWNA

SEQ ID NO: 1183 - protein, 14 aa, Artificial Sequence
  Description of Artificial Sequence: Synthetic peptide
YSLFCVKNLWCWNV

SEQ ID NO: 1184 - protein, 14 aa, Artificial Sequence
  Description of Artificial Sequence: Synthetic peptide
NYLWCWKNLYCWTD

SEQ ID NO: 1185 - protein, 14 aa, Artificial Sequence
  Description of Artificial Sequence: Synthetic peptide
YVLHCWHNLYCWNT

SEQ ID NO: 1186 - protein, 14 aa, Artificial Sequence
  Description of Artificial Sequence: Synthetic peptide
DVSFCQQKLQCSYD

SEQ ID NO: 1187 - protein, 14 aa, Artificial Sequence
  Description of Artificial Sequence: Synthetic peptide
NDLVCWRNIYCWIY

SEQ ID NO: 1188 - protein, 14 aa, Artificial Sequence
  Description of Artificial Sequence: Synthetic peptide
NTVPCAMNLWCRDF

SEQ ID NO: 1189 - protein, 14 aa, Artificial Sequence
  Description of Artificial Sequence: Synthetic peptide
SHFFCWRNLYCWND

SEQ ID NO: 1190 - protein, 14 aa, Artificial Sequence
  Description of Artificial Sequence: Synthetic peptide
DFLFCLRNVFCWTA

SEQ ID NO: 1191 - protein, 14 aa, Artificial Sequence
  Description of Artificial Sequence: Synthetic peptide
NDLFCVQNLYCWHT

SEQ ID NO: 1192 - protein, 14 aa, Artificial Sequence
  Description of Artificial Sequence: Synthetic peptide
DALFCFRNLWCWNL

SEQ ID NO: 1193 - protein, 14 aa, Artificial Sequence
  Description of Artificial Sequence: Synthetic peptide
YNLVCFQNIFCWHD

SEQ ID NO: 1194 - protein, 14 aa, Artificial Sequence
  Description of Artificial Sequence: Synthetic peptide
VPLFCVLKIFCGHN

SEQ ID NO: 1195 - protein, 14 aa, Artificial Sequence
  Description of Artificial Sequence: Synthetic peptide
YSLFCVHNLYCWNA

SEQ ID NO: 1196 - protein, 14 aa, Artificial Sequence
  Description of Artificial Sequence: Synthetic peptide
TNLFCGKSLQCRNI

SEQ ID NO: 1197 - protein, 14 aa, Artificial Sequence
  Description of Artificial Sequence: Synthetic peptide
HIVFCVNYLQCGHF

SEQ ID NO: 1198 - protein, 14 aa, Artificial Sequence
  Description of Artificial Sequence: Synthetic peptide
NHLLCASQFQCWNA

SEQ ID NO: 1199 - protein, 14 aa, Artificial Sequence
  Description of Artificial Sequence: Synthetic peptide
FILFCGQHLQCLDA

SEQ ID NO: 1200 - protein, 14 aa, Artificial Sequence
  Description of Artificial Sequence: Synthetic peptide
ADLLCFRNLWCWHN

SEQ ID NO: 1201 - protein, 14 aa, Artificial Sequence
  Description of Artificial Sequence: Synthetic peptide
TTLWCYRNVYCWNI

SEQ ID NO: 1202 - protein, 14 aa, Artificial Sequence
  Description of Artificial Sequence: Synthetic peptide
DSLWCLKNLVCQSN

SEQ ID NO: 1203 - protein, 14 aa, Artificial Sequence
  Description of Artificial Sequence: Synthetic peptide
VDFCAIFNWPVCSS

SEQ ID NO: 1204 - protein, 14 aa, Artificial Sequence
  Description of Artificial Sequence: Synthetic peptide
LDFCAIYKWPVCFE

SEQ ID NO: 1205 - protein, 14 aa, Artificial Sequence
  Description of Artificial Sequence: Synthetic peptide
VDFCAIYSWPICKI

SEQ ID NO: 1206 - protein, 14 aa, Artificial Sequence
  Description of Artificial Sequence: Synthetic peptide
IDFCAIYPWPICDT

SEQ ID NO: 1207 - protein, 14 aa, Artificial Sequence
  Description of Artificial Sequence: Synthetic peptide
IDFCAIYHWPVCTS

SEQ ID NO: 1208 - protein, 14 aa, Artificial Sequence
  Description of Artificial Sequence: Synthetic peptide
IDFCAIYQWPVCKS

SEQ ID NO: 1209 - protein, 14 aa, Artificial Sequence
  Description of Artificial Sequence: Synthetic peptide
MDFCAIYHWPVCNY

SEQ ID NO: 1210 - protein, 14 aa, Artificial Sequence
  Description of Artificial Sequence: Synthetic peptide
EDFCAIYRWPVCLT

SEQ ID NO: 1211 - protein, 14 aa, Artificial Sequence
  Description of Artificial Sequence: Synthetic peptide
VDFCAIYGWPVCDI

SEQ ID NO: 1212 - protein, 14 aa, Artificial Sequence
  Description of Artificial Sequence: Synthetic peptide
FDFCAIYRWPVCYD

SEQ ID NO: 1213 - protein, 14 aa, Artificial Sequence
  Description of Artificial Sequence: Synthetic peptide
VDFCAKYEWPICST

SEQ ID NO: 1214 - protein, 14 aa, Artificial Sequence
  Description of Artificial Sequence: Synthetic peptide
VDFCALYAWPVCNV

SEQ ID NO: 1215 - protein, 14 aa, Artificial Sequence
  Description of Artificial Sequence: Synthetic peptide
IDFCALYSWPVCNS

SEQ ID NO: 1216 - protein, 14 aa, Artificial Sequence
  Description of Artificial Sequence: Synthetic peptide
LDFCALYDWPVCRN

SEQ ID NO: 1217 - protein, 14 aa, Artificial Sequence
  Description of Artificial Sequence: Synthetic peptide
VDFCALYHWPVCGL

SEQ ID NO: 1218 - protein, 14 aa, Artificial Sequence
  Description of Artificial Sequence: Synthetic peptide
LDFCALYAWPVCNM

SEQ ID NO: 1219 - protein, 14 aa, Artificial Sequence
  Description of Artificial Sequence: Synthetic peptide
LDFCALNAWPVCNM

SEQ ID NO: 1220 - protein, 14 aa, Artificial Sequence
  Description of Artificial Sequence: Synthetic peptide
VDFCALYGWPVCYL

SEQ ID NO: 1221 - protein, 14 aa, Artificial Sequence
  Description of Artificial Sequence: Synthetic peptide
LDFCALYGWPICSA

SEQ ID NO: 1222 - protein, 14 aa, Artificial Sequence
  Description of Artificial Sequence: Synthetic peptide
VDFCALYNWPVCQT

SEQ ID NO: 1223 - protein, 14 aa, Artificial Sequence
  Description of Artificial Sequence: Synthetic peptide
IDFCALYRWPVCYM

SEQ ID NO: 1224 - protein, 14 aa, Artificial Sequence
  Description of Artificial Sequence: Synthetic peptide
VDFCALYEWPICMM

SEQ ID NO: 1225 - protein, 14 aa, Artificial Sequence
  Description of Artificial Sequence: Synthetic peptide
LDFCALYNWPVCNQ

SEQ ID NO: 1226 - protein, 14 aa, Artificial Sequence
  Description of Artificial Sequence: Synthetic peptide
VDFCALYNWPVCDT

SEQ ID NO: 1227 - protein, 14 aa, Artificial Sequence
  Description of Artificial Sequence: Synthetic peptide
VDFCALYAWPVCMY

SEQ ID NO: 1228 - protein, 14 aa, Artificial Sequence
  Description of Artificial Sequence: Synthetic peptide
LDFCALYAWPVCLG

SEQ ID NO: 1229 - protein, 14 aa, Artificial Sequence
  Description of Artificial Sequence: Synthetic peptide
VDFCALFEWPICGA

SEQ ID NO: 1230 - protein, 14 aa, Artificial Sequence
  Description of Artificial Sequence: Synthetic peptide
VDFCALYMWPVCRD

SEQ ID NO: 1231 - protein, 14 aa, Artificial Sequence
  Description of Artificial Sequence: Synthetic peptide
VDWCALYKWPVCST

SEQ ID NO: 1232 - protein, 14 aa, Artificial Sequence
  Description of Artificial Sequence: Synthetic peptide
VDWCALYSWPVCSH

SEQ ID NO: 1233 - protein, 14 aa, Artificial Sequence
  Description of Artificial Sequence: Synthetic peptide
LGFCALNGWPICSA

SEQ ID NO: 1234 - protein, 14 aa, Artificial Sequence
  Description of Artificial Sequence: Synthetic peptide
LDFCALNDWPVCKE

SEQ ID NO: 1235 - protein, 14 aa, Artificial Sequence
  Description of Artificial Sequence: Synthetic peptide
IDFCALYGWPVCDT

SEQ ID NO: 1236 - protein, 14 aa, Artificial Sequence
  Description of Artificial Sequence: Synthetic peptide
VDFCALYLWPICNQ

SEQ ID NO: 1237 - protein, 14 aa, Artificial Sequence
  Description of Artificial Sequence: Synthetic peptide
VDFCALYMWPVCQR

SEQ ID NO: 1238 - protein, 14 aa, Artificial Sequence
  Description of Artificial Sequence: Synthetic peptide
LDFCALNGWPICSA

SEQ ID NO: 1239 - protein, 14 aa, Artificial Sequence
  Description of Artificial Sequence: Synthetic peptide
EDFCALYKWPVCRT

SEQ ID NO: 1240 - protein, 14 aa, Artificial Sequence
  Description of Artificial Sequence: Synthetic peptide
IDFCAMYHWPVCDT

SEQ ID NO: 1241 - protein, 14 aa, Artificial Sequence
  Description of Artificial Sequence: Synthetic peptide
VDFCAMFSWPVCFT

SEQ ID NO: 1242 - protein, 14 aa, Artificial Sequence
  Description of Artificial Sequence: Synthetic peptide
VDFCAMYHWPICYQ

SEQ ID NO: 1243 - protein, 14 aa, Artificial Sequence
  Description of Artificial Sequence: Synthetic peptide
IDFCAMYQWPICYT

SEQ ID NO: 1244 - protein, 14 aa, Artificial Sequence
  Description of Artificial Sequence: Synthetic peptide
IDFCAMYQWPICVA

SEQ ID NO: 1245 - protein, 14 aa, Artificial Sequence
  Description of Artificial Sequence: Synthetic peptide
EDFCAMYYWPICGL

SEQ ID NO: 1246 - protein, 14 aa, Artificial Sequence
  Description of Artificial Sequence: Synthetic peptide
VDFCAMYKWPVCIG

SEQ ID NO: 1247 - protein, 14 aa, Artificial Sequence
  Description of Artificial Sequence: Synthetic peptide
IDFCAMYQWPICQT

SEQ ID NO: 1248 - protein, 14 aa, Artificial Sequence
  Description of Artificial Sequence: Synthetic peptide
EDFCAMYQWPVCIT

SEQ ID NO: 1249 - protein, 14 aa, Artificial Sequence
  Description of Artificial Sequence: Synthetic peptide
VDFCAMYSWPVCAE

SEQ ID NO: 1250 - protein, 14 aa, Artificial Sequence
  Description of Artificial Sequence: Synthetic peptide
LDFCAMYDWPVCGP

SEQ ID NO: 1251 - protein, 14 aa, Artificial Sequence
  Description of Artificial Sequence: Synthetic peptide
VDFCAQYGWPICVT

SEQ ID NO: 1252 - protein, 14 aa, Artificial Sequence
  Description of Artificial Sequence: Synthetic peptide
IDFCATYNWPVCGN

SEQ ID NO: 1253 - protein, 14 aa, Artificial Sequence
  Description of Artificial Sequence: Synthetic peptide
VDFCATYGWPVCFT

SEQ ID NO: 1254 - protein, 14 aa, Artificial Sequence
  Description of Artificial Sequence: Synthetic peptide
IDFCATYSWPVCAS

SEQ ID NO: 1255 - protein, 14 aa, Artificial Sequence
  Description of Artificial Sequence: Synthetic peptide
WTFCATSMWRYCVD

SEQ ID NO: 1256 - protein, 14 aa, Artificial Sequence
  Description of Artificial Sequence: Synthetic peptide
WKFCATSMWRYCVD

SEQ ID NO: 1257 - protein, 14 aa, Artificial Sequence
  Description of Artificial Sequence: Synthetic peptide
VDFCAVYEWPICRH

SEQ ID NO: 1258 - protein, 14 aa, Artificial Sequence
  Description of Artificial Sequence: Synthetic peptide
PDFCAVYNWPVCTN

SEQ ID NO: 1259 - protein, 14 aa, Artificial Sequence
  Description of Artificial Sequence: Synthetic peptide
VDFCAVYKWPVCLE

SEQ ID NO: 1260 - protein, 14 aa, Artificial Sequence
  Description of Artificial Sequence: Synthetic peptide
LDFCAVYRWPVCNM

SEQ ID NO: 1261 - protein, 14 aa, Artificial Sequence
  Description of Artificial Sequence: Synthetic peptide
VDFCAVYKWPVCSI

SEQ ID NO: 1262 - protein, 14 aa, Artificial Sequence
  Description of Artificial Sequence: Synthetic peptide
IDWCAVYKWPICLD

SEQ ID NO: 1263 - protein, 14 aa, Artificial Sequence
  Description of Artificial Sequence: Synthetic peptide
VDFCAVYGWPVCQT

SEQ ID NO: 1264 - protein, 14 aa, Artificial Sequence
  Description of Artificial Sequence: Synthetic peptide
IDFCAVYKWPVCAR

SEQ ID NO: 1265 - protein, 14 aa, Artificial Sequence
  Description of Artificial Sequence: Synthetic peptide
VDFCAVYGWPICDA

SEQ ID NO: 1266 - protein, 14 aa, Artificial Sequence
  Description of Artificial Sequence: Synthetic peptide
LVFCAVYDWPVCSN

SEQ ID NO: 1267 - protein, 14 aa, Artificial Sequence
  Description of Artificial Sequence: Synthetic peptide
VDFCAVWRWPVCDS

SEQ ID NO: 1268 - protein, 14 aa, Artificial Sequence
  Description of Artificial Sequence: Synthetic peptide
IDFCAVYNWPVCGS

SEQ ID NO: 1269 - protein, 14 aa, Artificial Sequence
  Description of Artificial Sequence: Synthetic peptide
EDFCDIYHWPVCRM

SEQ ID NO: 1270 - protein, 14 aa, Artificial Sequence
  Description of Artificial Sequence: Synthetic peptide
VDFCDLYRWPICLL

SEQ ID NO: 1271 - protein, 14 aa, Artificial Sequence
  Description of Artificial Sequence: Synthetic peptide
VDFCDLFSWPICNR

SEQ ID NO: 1272 - protein, 14 aa, Artificial Sequence
  Description of Artificial Sequence: Synthetic peptide
VDFCDLYDWPVCST

SEQ ID NO: 1273 - protein, 14 aa, Artificial Sequence
  Description of Artificial Sequence: Synthetic peptide
PYFCDMYNWPVCVT

SEQ ID NO: 1274 - protein, 14 aa, Artificial Sequence
  Description of Artificial Sequence: Synthetic peptide
VDFCEEYHWPVCDS

SEQ ID NO: 1275 - protein, 14 aa, Artificial Sequence
  Description of Artificial Sequence: Synthetic peptide
IDFCEIYRWPVCSR

SEQ ID NO: 1276 - protein, 14 aa, Artificial Sequence
  Description of Artificial Sequence: Synthetic peptide
VDFCEIYGWPICFD

SEQ ID NO: 1277 - protein, 14 aa, Artificial Sequence
  Description of Artificial Sequence: Synthetic peptide
IDFCEIYSWPVCIQ

SEQ ID NO: 1278 - protein, 14 aa, Artificial Sequence
  Description of Artificial Sequence: Synthetic peptide
VDFCEIYEWPICND

SEQ ID NO: 1279 - protein, 14 aa, Artificial Sequence
  Description of Artificial Sequence: Synthetic peptide
PNFCEIYRWPVCNV

SEQ ID NO: 1280 - protein, 14 aa, Artificial Sequence
  Description of Artificial Sequence: Synthetic peptide
LNFCEINRWPVCLG

SEQ ID NO: 1281 - protein, 14 aa, Artificial Sequence
  Description of Artificial Sequence: Synthetic peptide
IDFCEKYQWPVCLT

SEQ ID NO: 1282 - protein, 14 aa, Artificial Sequence
  Description of Artificial Sequence: Synthetic peptide
FDFCEKYKWPICIP

SEQ ID NO: 1283 - protein, 14 aa, Artificial Sequence
  Description of Artificial Sequence: Synthetic peptide
FDFCEKYKWPICNT

SEQ ID NO: 1284 - protein, 14 aa, Artificial Sequence
  Description of Artificial Sequence: Synthetic peptide
IDFCELYQWPVCGH

SEQ ID NO: 1285 - protein, 14 aa, Artificial Sequence
  Description of Artificial Sequence: Synthetic peptide
VDFCELYKWPVCFK

SEQ ID NO: 1286 - protein, 14 aa, Artificial Sequence
  Description of Artificial Sequence: Synthetic peptide
IDFCELYHWPVCSS

SEQ ID NO: 1287 - protein, 14 aa, Artificial Sequence
  Description of Artificial Sequence: Synthetic peptide
VDFCELYKWPVCMG

SEQ ID NO: 1288 - protein, 14 aa, Artificial Sequence
  Description of Artificial Sequence: Synthetic peptide
IDFCELYSWPVCGD

SEQ ID NO: 1289 - protein, 14 aa, Artificial Sequence
  Description of Artificial Sequence: Synthetic peptide
VDFCELYHWPVCDQ

SEQ ID NO: 1290 - protein, 14 aa, Artificial Sequence
  Description of Artificial Sequence: Synthetic peptide
LDFCELYHWPVCTL

SEQ ID NO: 1291 - protein, 14 aa, Artificial Sequence
  Description of Artificial Sequence: Synthetic peptide
VDFCELYSWPVCYL

SEQ ID NO: 1292 - protein, 14 aa, Artificial Sequence
  Description of Artificial Sequence: Synthetic peptide
IDFCELYHWPVCKW

SEQ ID NO: 1293 - protein, 14 aa, Artificial Sequence
  Description of Artificial Sequence: Synthetic peptide
PDFCELYRWPICRL

SEQ ID NO: 1294 - protein, 14 aa, Artificial Sequence
  Description of Artificial Sequence: Synthetic peptide
VDFCELYRWPVCMI

SEQ ID NO: 1295 - protein, 14 aa, Artificial Sequence
  Description of Artificial Sequence: Synthetic peptide
FDFCELYNWPVCQS

SEQ ID NO: 1296 - protein, 14 aa, Artificial Sequence
  Description of Artificial Sequence: Synthetic peptide
LDFCELYSWPICDI

SEQ ID NO: 1297 - protein, 14 aa, Artificial Sequence
  Description of Artificial Sequence: Synthetic peptide
VDFCELYEWPICFK

SEQ ID NO: 1298 - protein, 14 aa, Artificial Sequence
  Description of Artificial Sequence: Synthetic peptide
VDFCELYRWPVCYK

SEQ ID NO: 1299 - protein, 14 aa, Artificial Sequence
  Description of Artificial Sequence: Synthetic peptide
LDFCELYRWPVCGI

SEQ ID NO: 1300 - protein, 14 aa, Artificial Sequence
  Description of Artificial Sequence: Synthetic peptide
VDFCELYRWPVCNG

SEQ ID NO: 1301 - protein, 14 aa, Artificial Sequence
  Description of Artificial Sequence: Synthetic peptide
PDFCELYQWPVCDR

SEQ ID NO: 1302 - protein, 14 aa, Artificial Sequence
  Description of Artificial Sequence: Synthetic peptide
VDFCEMYNWPVCRM

SEQ ID NO: 1303 - protein, 14 aa, Artificial Sequence
  Description of Artificial Sequence: Synthetic peptide
LDFCEMYGWPVCKV

SEQ ID NO: 1304 - protein, 14 aa, Artificial Sequence
  Description of Artificial Sequence: Synthetic peptide
LDFCEMYDWPVCRL

SEQ ID NO: 1305 - protein, 14 aa, Artificial Sequence
  Description of Artificial Sequence: Synthetic peptide
LDFCEMYNWPVCKD

SEQ ID NO: 1306 - protein, 14 aa, Artificial Sequence
  Description of Artificial Sequence: Synthetic peptide
EDFCEMYNWPVCWK

SEQ ID NO: 1307 - protein, 14 aa, Artificial Sequence
  Description of Artificial Sequence: Synthetic peptide
VDFCEMYRWPVCAS

SEQ ID NO: 1308 - protein, 14 aa, Artificial Sequence
  Description of Artificial Sequence: Synthetic peptide
PDFCEMYKWPVCDG

SEQ ID NO: 1309 - protein, 14 aa, Artificial Sequence
  Description of Artificial Sequence: Synthetic peptide
VDFCEVYHWPVCQR

SEQ ID NO: 1310 - protein, 14 aa, Artificial Sequence
  Description of Artificial Sequence: Synthetic peptide
VDFCEVYHWPVCDR

SEQ ID NO: 1311 - protein, 14 aa, Artificial Sequence
  Description of Artificial Sequence: Synthetic peptide
LDFCEVYRWPICGD

SEQ ID NO: 1312 - protein, 14 aa, Artificial Sequence
  Description of Artificial Sequence: Synthetic peptide
VDFCFIYSWPVCTE

SEQ ID NO: 1313 - protein, 14 aa, Artificial Sequence
  Description of Artificial Sequence: Synthetic peptide
IDFCFIYNWPVCNT

SEQ ID NO: 1314 - protein, 14 aa, Artificial Sequence
  Description of Artificial Sequence: Synthetic peptide
LDWCFIYNWPVCQT

SEQ ID NO: 1315 - protein, 14 aa, Artificial Sequence
  Description of Artificial Sequence: Synthetic peptide
VDFCFLYSWPVCST

SEQ ID NO: 1316 - protein, 14 aa, Artificial Sequence
  Description of Artificial Sequence: Synthetic peptide
IDFCFLYSWPVCRE

SEQ ID NO: 1317 - protein, 14 aa, Artificial Sequence
  Description of Artificial Sequence: Synthetic peptide
IDFCFLYRWPVCSS

SEQ ID NO: 1318 - protein, 14 aa, Artificial Sequence
  Description of Artificial Sequence: Synthetic peptide
PDFCFLYDWPVCYE

SEQ ID NO: 1319 - protein, 14 aa, Artificial Sequence
  Description of Artificial Sequence: Synthetic peptide
LDFCFMYDWPVCRG

SEQ ID NO: 1320 - protein, 14 aa, Artificial Sequence
  Description of Artificial Sequence: Synthetic peptide
VDFCFMFHWPVCAE

SEQ ID NO: 1321 - protein, 14 aa, Artificial Sequence
  Description of Artificial Sequence: Synthetic peptide
VDFCFMYRWPVCET

SEQ ID NO: 1322 - protein, 14 aa, Artificial Sequence
  Description of Artificial Sequence: Synthetic peptide
EDFCFMYTWPVCHN

SEQ ID NO: 1323 - protein, 14 aa, Artificial Sequence
  Description of Artificial Sequence: Synthetic peptide
VDFCFRYNWPICMR

SEQ ID NO: 1324 - protein, 14 aa, Artificial Sequence
  Description of Artificial Sequence: Synthetic peptide
VDFCFRYGWPVCGT

SEQ ID NO: 1325 - protein, 14 aa, Artificial Sequence
  Description of Artificial Sequence: Synthetic peptide
VDFCGIYRWPVCNM

SEQ ID NO: 1326 - protein, 14 aa, Artificial Sequence
  Description of Artificial Sequence: Synthetic peptide
VDFCGIYRWPVCMT

SEQ ID NO: 1327 - protein, 14 aa, Artificial Sequence
  Description of Artificial Sequence: Synthetic peptide
IDFCGIYQWPICHN

SEQ ID NO: 1328 - protein, 14 aa, Artificial Sequence
  Description of Artificial Sequence: Synthetic peptide
LDFCGIYRWPVCET

SEQ ID NO: 1329 - protein, 14 aa, Artificial Sequence
  Description of Artificial Sequence: Synthetic peptide
VDFCGLYNWPVCAS

SEQ ID NO: 1330 - protein, 14 aa, Artificial Sequence
  Description of Artificial Sequence: Synthetic peptide
VDFCGLYNWPVCQE

SEQ ID NO: 1331 - protein, 14 aa, Artificial Sequence
  Description of Artificial Sequence: Synthetic peptide
VDFCGLYHWPICDK

SEQ ID NO: 1332 - protein, 14 aa, Artificial Sequence
  Description of Artificial Sequence: Synthetic peptide
VDFCGLYNWPICAT

SEQ ID NO: 1333 - protein, 14 aa, Artificial Sequence
  Description of Artificial Sequence: Synthetic peptide
VDFCGLYRWPVCNQ

SEQ ID NO: 1334 - protein, 14 aa, Artificial Sequence
  Description of Artificial Sequence: Synthetic peptide
EDFCGMYHWPVCDI

SEQ ID NO: 1335 - protein, 14 aa, Artificial Sequence
  Description of Artificial Sequence: Synthetic peptide
IDFCGMYEWPICEM

SEQ ID NO: 1336 - protein, 14 aa, Artificial Sequence
  Description of Artificial Sequence: Synthetic peptide
EDFCGMYHWPICSG

SEQ ID NO: 1337 - protein, 14 aa, Artificial Sequence
  Description of Artificial Sequence: Synthetic peptide
VDFCGMYHWPICYK

SEQ ID NO: 1338 - protein, 14 aa, Artificial Sequence
  Description of Artificial Sequence: Synthetic peptide
FDFCGTYHWPVCES

SEQ ID NO: 1339 - protein, 14 aa, Artificial Sequence
  Description of Artificial Sequence: Synthetic peptide
IDFCGVYKWPVCTL

SEQ ID NO: 1340 - protein, 14 aa, Artificial Sequence
  Description of Artificial Sequence: Synthetic peptide
VEFCHLYNWPICSK

SEQ ID NO: 1341 - protein, 14 aa, Artificial Sequence
  Description of Artificial Sequence: Synthetic peptide
VDFCHMYRWPVCDM

SEQ ID NO: 1342 - protein, 14 aa, Artificial Sequence
  Description of Artificial Sequence: Synthetic peptide
VDFCIIYNWPVCRD

SEQ ID NO: 1343 - protein, 14 aa, Artificial Sequence
  Description of Artificial Sequence: Synthetic peptide
IDFCILYDWPVCEM

SEQ ID NO: 1344 - protein, 14 aa, Artificial Sequence
  Description of Artificial Sequence: Synthetic peptide
VDFCKEYNWPICSD

SEQ ID NO: 1345 - protein, 14 aa, Artificial Sequence
  Description of Artificial Sequence: Synthetic peptide
IDFCKEYSWPICLN

SEQ ID NO: 1346 - protein, 14 aa, Artificial Sequence
  Description of Artificial Sequence: Synthetic peptide
LDFCKIYDWPICGH

SEQ ID NO: 1347 - protein, 14 aa, Artificial Sequence
  Description of Artificial Sequence: Synthetic peptide
VDFCKIYSWPVCSN

SEQ ID NO: 1348 - protein, 14 aa, Artificial Sequence
  Description of Artificial Sequence: Synthetic peptide
LDFCKINDWPICHL

SEQ ID NO: 1349 - protein, 14 aa, Artificial Sequence
  Description of Artificial Sequence: Synthetic peptide
VDFCKIYEWPICRM

SEQ ID NO: 1350 - protein, 14 aa, Artificial Sequence
  Description of Artificial Sequence: Synthetic peptide
LDFCKIYGWPVCYT

SEQ ID NO: 1351 - protein, 14 aa, Artificial Sequence
  Description of Artificial Sequence: Synthetic peptide
IDFCKLYEWPVCFI

SEQ ID NO: 1352 - protein, 14 aa, Artificial Sequence
  Description of Artificial Sequence: Synthetic peptide
PDFCKLNKWPVCIQ

SEQ ID NO: 1353 - protein, 14 aa, Artificial Sequence
  Description of Artificial Sequence: Synthetic peptide
VDFCKLYHWPVCTG

SEQ ID NO: 1354 - protein, 14 aa, Artificial Sequence
  Description of Artificial Sequence: Synthetic peptide
VDFCKLYKWPVCEG

SEQ ID NO: 1355 - protein, 14 aa, Artificial Sequence
  Description of Artificial Sequence: Synthetic peptide
PDFCKLYQWPICVR

SEQ ID NO: 1356 - protein, 14 aa, Artificial Sequence
  Description of Artificial Sequence: Synthetic peptide
LDFCKLYHWPVCRD

SEQ ID NO: 1357 - protein, 14 aa, Artificial Sequence
  Description of Artificial Sequence: Synthetic peptide
VEFCKLYQWPICQS

SEQ ID NO: 1358 - protein, 14 aa, Artificial Sequence
  Description of Artificial Sequence: Synthetic peptide
LDFCKLYHWPVCSD

SEQ ID NO: 1359 - protein, 14 aa, Artificial Sequence
  Description of Artificial Sequence: Synthetic peptide
VDFCKMYAWPVCKL

SEQ ID NO: 1360 - protein, 14 aa, Artificial Sequence
  Description of Artificial Sequence: Synthetic peptide
VDFCKMYAWPVCEM

SEQ ID NO: 1361 - protein, 14 aa, Artificial Sequence
  Description of Artificial Sequence: Synthetic peptide
VDFCKMFAWPVCNT

SEQ ID NO: 1362 - protein, 14 aa, Artificial Sequence
  Description of Artificial Sequence: Synthetic peptide
MDFCKMYRWPICGM

SEQ ID NO: 1363 - protein, 14 aa, Artificial Sequence
  Description of Artificial Sequence: Synthetic peptide
VDFCKMYDWPVCTN

SEQ ID NO: 1364 - protein, 14 aa, Artificial Sequence
  Description of Artificial Sequence: Synthetic peptide
FDFCKMYDWPVCRL

SEQ ID NO: 1365 - protein, 14 aa, Artificial Sequence
  Description of Artificial Sequence: Synthetic peptide
INFCKMYEWPICST

SEQ ID NO: 1366 - protein, 14 aa, Artificial Sequence
  Description of Artificial Sequence: Synthetic peptide
VDFCKVYNWPVCWL

SEQ ID NO: 1367 - protein, 14 aa, Artificial Sequence
  Description of Artificial Sequence: Synthetic peptide
IDFCKVFAWPVCTA

SEQ ID NO: 1368 - protein, 14 aa, Artificial Sequence
  Description of Artificial Sequence: Synthetic peptide
IDFCLIYQWPICVN

SEQ ID NO: 1369 - protein, 14 aa, Artificial Sequence
  Description of Artificial Sequence: Synthetic peptide
VDFCLIYQWPVCNS

SEQ ID NO: 1370 - protein, 14 aa, Artificial Sequence
  Description of Artificial Sequence: Synthetic peptide
IDFCLIYNWPVCYT

SEQ ID NO: 1371 - protein, 14 aa, Artificial Sequence
  Description of Artificial Sequence: Synthetic peptide
VDFCLIYKWPVCGL

SEQ ID NO: 1372 - protein, 14 aa, Artificial Sequence
  Description of Artificial Sequence: Synthetic peptide
IDFCLIYEWPVCTA

SEQ ID NO: 1373 - protein, 14 aa, Artificial Sequence
  Description of Artificial Sequence: Synthetic peptide
VDFCLKYNWPVCDG

SEQ ID NO: 1374 - protein, 14 aa, Artificial Sequence
  Description of Artificial Sequence: Synthetic peptide
LDFCLLYDWPVCQT

SEQ ID NO: 1375 - protein, 14 aa, Artificial Sequence
  Description of Artificial Sequence: Synthetic peptide
IDFCLLYKWPVCEL

SEQ ID NO: 1376 - protein, 14 aa, Artificial Sequence
  Description of Artificial Sequence: Synthetic peptide
LNFCLLYDWPVCAS

SEQ ID NO: 1377 - protein, 14 aa, Artificial Sequence
  Description of Artificial Sequence: Synthetic peptide
VDFCLLYEWPVCNL

SEQ ID NO: 1378 - protein, 14 aa, Artificial Sequence
  Description of Artificial Sequence: Synthetic peptide
IDFCLMYNWPVCTT

SEQ ID NO: 1379 - protein, 14 aa, Artificial Sequence
  Description of Artificial Sequence: Synthetic peptide
VDFCLMYQWPICHM

SEQ ID NO: 1380 - protein, 14 aa, Artificial Sequence
  Description of Artificial Sequence: Synthetic peptide
IDFCLMYHWPVCYE

SEQ ID NO: 1381 - protein, 14 aa, Artificial Sequence
  Description of Artificial Sequence: Synthetic peptide
IDFCLMYNWPVCMS

SEQ ID NO: 1382 - protein, 14 aa, Artificial Sequence
  Description of Artificial Sequence: Synthetic peptide
LDFCLMYKWPVCDF

SEQ ID NO: 1383 - protein, 14 aa, Artificial Sequence
  Description of Artificial Sequence: Synthetic peptide
IDFCLMYSWPVCTA

SEQ ID NO: 1384 - protein, 14 aa, Artificial Sequence
  Description of Artificial Sequence: Synthetic peptide
INFCLVYDWPVCKQ

SEQ ID NO: 1385 - protein, 14 aa, Artificial Sequence
  Description of Artificial Sequence: Synthetic peptide
FDFCLVYSWPVCNS

SEQ ID NO: 1386 - protein, 14 aa, Artificial Sequence
  Description of Artificial Sequence: Synthetic peptide
IDFCLVYNWPVCRS

SEQ ID NO: 1387 - protein, 14 aa, Artificial Sequence
  Description of Artificial Sequence: Synthetic peptide
LDFCLWYKWPVCEQ

SEQ ID NO: 1388 - protein, 14 aa, Artificial Sequence
  Description of Artificial Sequence: Synthetic peptide
IDFCMFYEWPICGT

SEQ ID NO: 1389 - protein, 14 aa, Artificial Sequence
  Description of Artificial Sequence: Synthetic peptide
LVFCMFNNWPVCQH

SEQ ID NO: 1390 - protein, 14 aa, Artificial Sequence
  Description of Artificial Sequence: Synthetic peptide
MDFCMIYNWPVCAQ

SEQ ID NO: 1391 - protein, 14 aa, Artificial Sequence
  Description of Artificial Sequence: Synthetic peptide
LDFCMIYAWPICAQ

SEQ ID NO: 1392 - protein, 14 aa, Artificial Sequence
  Description of Artificial Sequence: Synthetic peptide
IDFCMIYRWPVCQV

SEQ ID NO: 1393 - protein, 14 aa, Artificial Sequence
  Description of Artificial Sequence: Synthetic peptide
LDFCMIYKWPICKG

SEQ ID NO: 1394 - protein, 14 aa, Artificial Sequence
  Description of Artificial Sequence: Synthetic peptide
LDFCMINDWPVCSK

SEQ ID NO: 1395 - protein, 14 aa, Artificial Sequence
  Description of Artificial Sequence: Synthetic peptide
VDFCMLYKWPICKT

SEQ ID NO: 1396 - protein, 14 aa, Artificial Sequence
  Description of Artificial Sequence: Synthetic peptide
VDFCMLYNWPVCME

SEQ ID NO: 1397 - protein, 14 aa, Artificial Sequence
  Description of Artificial Sequence: Synthetic peptide
IDFCMLYQWPVCHK

SEQ ID NO: 1398 - protein, 14 aa, Artificial Sequence
  Description of Artificial Sequence: Synthetic peptide
IDFCMLYAWPVCNS

SEQ ID NO: 1399 - protein, 14 aa, Artificial Sequence
  Description of Artificial Sequence: Synthetic peptide
VDFCMLYSWPVCLT

SEQ ID NO: 1400 - protein, 14 aa, Artificial Sequence
  Description of Artificial Sequence: Synthetic peptide
IDFCMLYNWPICAE

SEQ ID NO: 1401 - protein, 14 aa, Artificial Sequence
  Description of Artificial Sequence: Synthetic peptide
PDFCMMYDWPVCRI

SEQ ID NO: 1402 - protein, 14 aa, Artificial Sequence
  Description of Artificial Sequence: Synthetic peptide
FVFCNILAMRNCVS

SEQ ID NO: 1403 - protein, 14 aa, Artificial Sequence
  Description of Artificial Sequence: Synthetic peptide
VDFCNIYNWPVCLD

SEQ ID NO: 1404 - protein, 14 aa, Artificial Sequence
  Description of Artificial Sequence: Synthetic peptide
VDFCNLYNWPVCQN

SEQ ID NO: 1405 - protein, 14 aa, Artificial Sequence
  Description of Artificial Sequence: Synthetic peptide
YWLCNQGKWLACEQ

SEQ ID NO: 1406 - protein, 14 aa, Artificial Sequence
  Description of Artificial Sequence: Synthetic peptide
FVLCNTLTMRECVS

SEQ ID NO: 1407 - protein, 14 aa, Artificial Sequence
  Description of Artificial Sequence: Synthetic peptide
IDFCNVYDWPVCRT

SEQ ID NO: 1408 - protein, 14 aa, Artificial Sequence
  Description of Artificial Sequence: Synthetic peptide
VTFCPTSQWRYCII

SEQ ID NO: 1409 - protein, 14 aa, Artificial Sequence
  Description of Artificial Sequence: Synthetic peptide
IDFCQEYNWPVCVN

SEQ ID NO: 1410 - protein, 14 aa, Artificial Sequence
  Description of Artificial Sequence: Synthetic peptide
VDFCQIYSWPVCNW

SEQ ID NO: 1411 - protein, 14 aa, Artificial Sequence
  Description of Artificial Sequence: Synthetic peptide
VDFCQIYKWPVCEQ

SEQ ID NO: 1412 - protein, 14 aa, Artificial Sequence
  Description of Artificial Sequence: Synthetic peptide
VDFCQIYNWPVCTD

SEQ ID NO: 1413 - protein, 14 aa, Artificial Sequence
  Description of Artificial Sequence: Synthetic peptide
FDFCQIYNWPICGR

SEQ ID NO: 1414 - protein, 14 aa, Artificial Sequence
  Description of Artificial Sequence: Synthetic peptide
VDFCQIYAWPVCGN

SEQ ID NO: 1415 - protein, 14 aa, Artificial Sequence
  Description of Artificial Sequence: Synthetic peptide
NEQCQIYIMAVCRA

SEQ ID NO: 1416 - protein, 14 aa, Artificial Sequence
  Description of Artificial Sequence: Synthetic peptide
VDFCQLYHWPVCNA

SEQ ID NO: 1417 - protein, 14 aa, Artificial Sequence
  Description of Artificial Sequence: Synthetic peptide
PDFCQLNNWPVCAG

SEQ ID NO: 1418 - protein, 14 aa, Artificial Sequence
  Description of Artificial Sequence: Synthetic peptide
VDFCQLYAWPVCGT

SEQ ID NO: 1419 - protein, 14 aa, Artificial Sequence
  Description of Artificial Sequence: Synthetic peptide
IDFCQLYSWPVCVN

SEQ ID NO: 1420 - protein, 14 aa, Artificial Sequence
  Description of Artificial Sequence: Synthetic peptide
LDFCQLYRWPVCEV

SEQ ID NO: 1421 - protein, 14 aa, Artificial Sequence
  Description of Artificial Sequence: Synthetic peptide
VDFCQLYRWPVCGN

SEQ ID NO: 1422 - protein, 14 aa, Artificial Sequence
  Description of Artificial Sequence: Synthetic peptide
VDWCQLYNWPVCRE

SEQ ID NO: 1423 - protein, 14 aa, Artificial Sequence
  Description of Artificial Sequence: Synthetic peptide
VDFCQMYDWPICMA

SEQ ID NO: 1424 - protein, 14 aa, Artificial Sequence
  Description of Artificial Sequence: Synthetic peptide
IDFCQMYSWPVCGQ

SEQ ID NO: 1425 - protein, 14 aa, Artificial Sequence
  Description of Artificial Sequence: Synthetic peptide
VDFCQMYMWPVCLS

SEQ ID NO: 1426 - protein, 14 aa, Artificial Sequence
  Description of Artificial Sequence: Synthetic peptide
IDFCQVYSWPVCEQ

SEQ ID NO: 1427 - protein, 14 aa, Artificial Sequence
  Description of Artificial Sequence: Synthetic peptide
MDFCQVYAWPVCNM

SEQ ID NO: 1428 - protein, 14 aa, Artificial Sequence
  Description of Artificial Sequence: Synthetic peptide
VDFCQVYNWPVCLS

SEQ ID NO: 1429 - protein, 14 aa, Artificial Sequence
  Description of Artificial Sequence: Synthetic peptide
LDFCQVYNWPICAW

SEQ ID NO: 1430 - protein, 14 aa, Artificial Sequence
  Description of Artificial Sequence: Synthetic peptide
LESCQVYEWHGCGA

SEQ ID NO: 1431 - protein, 14 aa, Artificial Sequence
  Description of Artificial Sequence: Synthetic peptide
IDFCREYNWPVCSW

SEQ ID NO: 1432 - protein, 14 aa, Artificial Sequence
  Description of Artificial Sequence: Synthetic peptide
VDFCRFYDWPVCDT

SEQ ID NO: 1433 - protein, 14 aa, Artificial Sequence
  Description of Artificial Sequence: Synthetic peptide
LDFCRIYRWPVCET

SEQ ID NO: 1434 - protein, 14 aa, Artificial Sequence
  Description of Artificial Sequence: Synthetic peptide
VDFCRIYHWPVCED

SEQ ID NO: 1435 - protein, 14 aa, Artificial Sequence
  Description of Artificial Sequence: Synthetic peptide
VDFCRIYQWPVCGS

SEQ ID NO: 1436 - protein, 14 aa, Artificial Sequence
  Description of Artificial Sequence: Synthetic peptide
VDFCRIYNWPVCIN

SEQ ID NO: 1437 - protein, 14 aa, Artificial Sequence
  Description of Artificial Sequence: Synthetic peptide
VDFCRIYQWPVCTY

SEQ ID NO: 1438 - protein, 14 aa, Artificial Sequence
  Description of Artificial Sequence: Synthetic peptide
VDFCRIYSWPVCTL

SEQ ID NO: 1439 - protein, 14 aa, Artificial Sequence
  Description of Artificial Sequence: Synthetic peptide
LDFCRIYNWPVCAR

SEQ ID NO: 1440 - protein, 14 aa, Artificial Sequence
  Description of Artificial Sequence: Synthetic peptide
LDFCRINDWPVCQS

SEQ ID NO: 1441 - protein, 14 aa, Artificial Sequence
  Description of Artificial Sequence: Synthetic peptide
VDFCRLYHWPVCGD

SEQ ID NO: 1442 - protein, 14 aa, Artificial Sequence
  Description of Artificial Sequence: Synthetic peptide
IDFCRLYDWPVCGL

SEQ ID NO: 1443 - protein, 14 aa, Artificial Sequence
  Description of Artificial Sequence: Synthetic peptide
VDFCRLYDWPVCQD

SEQ ID NO: 1444 - protein, 14 aa, Artificial Sequence
  Description of Artificial Sequence: Synthetic peptide
VDWCRLYQWPVCYQ

SEQ ID NO: 1445 - protein, 14 aa, Artificial Sequence
  Description of Artificial Sequence: Synthetic peptide
IDFCRLYNWPICPG

SEQ ID NO: 1446 - protein, 14 aa, Artificial Sequence
  Description of Artificial Sequence: Synthetic peptide
LDFCRLYKWPICSV

SEQ ID NO: 1447 - protein, 14 aa, Artificial Sequence
  Description of Artificial Sequence: Synthetic peptide
LDFCRLYNWPVCSM

SEQ ID NO: 1448 - protein, 14 aa, Artificial Sequence
  Description of Artificial Sequence: Synthetic peptide
LDFCRLYNWPVCGV

SEQ ID NO: 1449 - protein, 14 aa, Artificial Sequence
  Description of Artificial Sequence: Synthetic peptide
VDFCRLYNWPVCSV

SEQ ID NO: 1450 - protein, 14 aa, Artificial Sequence
  Description of Artificial Sequence: Synthetic peptide
VDFCRLYSWPVCQE

SEQ ID NO: 1451 - protein, 14 aa, Artificial Sequence
  Description of Artificial Sequence: Synthetic peptide
VDFCRLYTWPICQS

SEQ ID NO: 1452 - protein, 14 aa, Artificial Sequence
  Description of Artificial Sequence: Synthetic peptide
PDFCRLYDWPVCAK

SEQ ID NO: 1453 - protein, 14 aa, Artificial Sequence
  Description of Artificial Sequence: Synthetic peptide
LDFCRLNDWPVCQT

SEQ ID NO: 1454 - protein, 14 aa, Artificial Sequence
  Description of Artificial Sequence: Synthetic peptide
VDFCRLYDWPVCIE

SEQ ID NO: 1455 - protein, 14 aa, Artificial Sequence
  Description of Artificial Sequence: Synthetic peptide
IDWCRMYEWPVCKH

SEQ ID NO: 1456 - protein, 14 aa, Artificial Sequence
  Description of Artificial Sequence: Synthetic peptide
VDFCRVYNWPVCQV

SEQ ID NO: 1457 - protein, 14 aa, Artificial Sequence
  Description of Artificial Sequence: Synthetic peptide
IDFCRVYEWPICYG

SEQ ID NO: 1458 - protein, 14 aa, Artificial Sequence
  Description of Artificial Sequence: Synthetic peptide
IDFCRVYDWPVCNR

SEQ ID NO: 1459 - protein, 14 aa, Artificial Sequence
  Description of Artificial Sequence: Synthetic peptide
IDFCRVYDWPVCNW

SEQ ID NO: 1460 - protein, 14 aa, Artificial Sequence
  Description of Artificial Sequence: Synthetic peptide
DWFCRVYSWPICQD

SEQ ID NO: 1461 - protein, 14 aa, Artificial Sequence
  Description of Artificial Sequence: Synthetic peptide
IDFCRVYSWPVCGT

SEQ ID NO: 1462 - protein, 14 aa, Artificial Sequence
  Description of Artificial Sequence: Synthetic peptide
VDWCRYYDWPVCST

SEQ ID NO: 1463 - protein, 14 aa, Artificial Sequence
  Description of Artificial Sequence: Synthetic peptide
VDFCSIYHWPVCYV

SEQ ID NO: 1464 - protein, 14 aa, Artificial Sequence
  Description of Artificial Sequence: Synthetic peptide
VDFCSIYRWPVCTG

SEQ ID NO: 1465 - protein, 14 aa, Artificial Sequence
  Description of Artificial Sequence: Synthetic peptide
IDFCSIYSWPVCRH

SEQ ID NO: 1466 - protein, 14 aa, Artificial Sequence
  Description of Artificial Sequence: Synthetic peptide
LDFCSINDWPVCNV

SEQ ID NO: 1467 - protein, 14 aa, Artificial Sequence
  Description of Artificial Sequence: Synthetic peptide
IDWCSLYAWPVCEL

SEQ ID NO: 1468 - protein, 14 aa, Artificial Sequence
  Description of Artificial Sequence: Synthetic peptide
EDFCSLYKWPICNS

SEQ ID NO: 1469 - protein, 14 aa, Artificial Sequence
  Description of Artificial Sequence: Synthetic peptide
VDFCSLYDWPVCNQ

SEQ ID NO: 1470 - protein, 14 aa, Artificial Sequence
  Description of Artificial Sequence: Synthetic peptide
FDFCSLYKWPVCET

SEQ ID NO: 1471 - protein, 14 aa, Artificial Sequence
  Description of Artificial Sequence: Synthetic peptide
VDFCSLYDWPVCSG

SEQ ID NO: 1472 - protein, 14 aa, Artificial Sequence
  Description of Artificial Sequence: Synthetic peptide
VDFCSLYNWPVCQN

SEQ ID NO: 1473 - protein, 14 aa, Artificial Sequence
  Description of Artificial Sequence: Synthetic peptide
VDFCSLYNWPVCKM

SEQ ID NO: 1474 - protein, 14 aa, Artificial Sequence
  Description of Artificial Sequence: Synthetic peptide
IDFCSLYSWPVCMS

SEQ ID NO: 1475 - protein, 14 aa, Artificial Sequence
  Description of Artificial Sequence: Synthetic peptide
VDFCSLYNWPVCMR

SEQ ID NO: 1476 - protein, 14 aa, Artificial Sequence
  Description of Artificial Sequence: Synthetic peptide
VDFCSLYHWPVCMQ

SEQ ID NO: 1477 - protein, 14 aa, Artificial Sequence
  Description of Artificial Sequence: Synthetic peptide
VDFCSLYQWPVCDV

SEQ ID NO: 1478 - protein, 14 aa, Artificial Sequence
  Description of Artificial Sequence: Synthetic peptide
IDFCSLYKWPICGA

SEQ ID NO: 1479 - protein, 14 aa, Artificial Sequence
  Description of Artificial Sequence: Synthetic peptide
MDFCSLYNWPVCRL

SEQ ID NO: 1480 - protein, 14 aa, Artificial Sequence
  Description of Artificial Sequence: Synthetic peptide
LDFCSLYAWPICAK

SEQ ID NO: 1481 - protein, 14 aa, Artificial Sequence
  Description of Artificial Sequence: Synthetic peptide
VDFCSLYDWPVCLS

SEQ ID NO: 1482 - protein, 14 aa, Artificial Sequence
  Description of Artificial Sequence: Synthetic peptide
IDFCSLYKWPICGG

SEQ ID NO: 1483 - protein, 14 aa, Artificial Sequence
  Description of Artificial Sequence: Synthetic peptide
VDFCSMYNWPVCAR

SEQ ID NO: 1484 - protein, 14 aa, Artificial Sequence
  Description of Artificial Sequence: Synthetic peptide
VDFCSMYNWPVCVQ

SEQ ID NO: 1485 - protein, 14 aa, Artificial Sequence
  Description of Artificial Sequence: Synthetic peptide
LDFCSMYHWPVCGD

SEQ ID NO: 1486 - protein, 14 aa, Artificial Sequence
  Description of Artificial Sequence: Synthetic peptide
LDFCSMYNWPVCRE

SEQ ID NO: 1487 - protein, 14 aa, Artificial Sequence
  Description of Artificial Sequence: Synthetic peptide
VDFCSMYQWPVCDG

SEQ ID NO: 1488 - protein, 14 aa, Artificial Sequence
  Description of Artificial Sequence: Synthetic peptide
VDFCSMYMWPVCYQ

SEQ ID NO: 1489 - protein, 14 aa, Artificial Sequence
  Description of Artificial Sequence: Synthetic peptide
LDFCSMYDWPVCAR

SEQ ID NO: 1490 - protein, 14 aa, Artificial Sequence
  Description of Artificial Sequence: Synthetic peptide
PDFCSMYQWPVCQE

SEQ ID NO: 1491 - protein, 14 aa, Artificial Sequence
  Description of Artificial Sequence: Synthetic peptide
VDFCSMYAWPVCKT

SEQ ID NO: 1492 - protein, 14 aa, Artificial Sequence
  Description of Artificial Sequence: Synthetic peptide
IDFCSVYNWPVCDP

SEQ ID NO: 1493 - protein, 14 aa, Artificial Sequence
  Description of Artificial Sequence: Synthetic peptide
MDFCSVYQWPICGS

SEQ ID NO: 1494 - protein, 14 aa, Artificial Sequence
  Description of Artificial Sequence: Synthetic peptide
VDFCSVYQWPICYK

SEQ ID NO: 1495 - protein, 14 aa, Artificial Sequence
  Description of Artificial Sequence: Synthetic peptide
VDWCSVYDWPVCRQ

SEQ ID NO: 1496 - protein, 14 aa, Artificial Sequence
  Description of Artificial Sequence: Synthetic peptide
LDFCSYYDWPVCRT

SEQ ID NO: 1497 - protein, 14 aa, Artificial Sequence
  Description of Artificial Sequence: Synthetic peptide
LDFCTFYDWPVCIG

SEQ ID NO: 1498 - protein, 14 aa, Artificial Sequence
  Description of Artificial Sequence: Synthetic peptide
VDFCTIYHWPVCFT

SEQ ID NO: 1499 - protein, 14 aa, Artificial Sequence
  Description of Artificial Sequence: Synthetic peptide
LDFCTIYNWPICNR

SEQ ID NO: 1500 - protein, 14 aa, Artificial Sequence
  Description of Artificial Sequence: Synthetic peptide
LDFCTLYKWPVCKI

SEQ ID NO: 1501 - protein, 14 aa, Artificial Sequence
  Description of Artificial Sequence: Synthetic peptide
VDFCTLYHWPVCTV

SEQ ID NO: 1502 - protein, 14 aa, Artificial Sequence
  Description of Artificial Sequence: Synthetic peptide
IDFCTMYHWPICDT

SEQ ID NO: 1503 - protein, 14 aa, Artificial Sequence
  Description of Artificial Sequence: Synthetic peptide
LDFCTMYDWPVCGH

SEQ ID NO: 1504 - protein, 14 aa, Artificial Sequence
  Description of Artificial Sequence: Synthetic peptide
IDFCTMYQWPICDT

SEQ ID NO: 1505 - protein, 14 aa, Artificial Sequence
  Description of Artificial Sequence: Synthetic peptide
VDFCTVYNWPVCQT

SEQ ID NO: 1506 - protein, 14 aa, Artificial Sequence
  Description of Artificial Sequence: Synthetic peptide
IDFCTVYKWPVCQI

SEQ ID NO: 1507 - protein, 14 aa, Artificial Sequence
  Description of Artificial Sequence: Synthetic peptide
VDFCTVYRWPICSN

SEQ ID NO: 1508 - protein, 14 aa, Artificial Sequence
  Description of Artificial Sequence: Synthetic peptide
FDFCTVYSWPVCRQ

SEQ ID NO: 1509 - protein, 14 aa, Artificial Sequence
  Description of Artificial Sequence: Synthetic peptide
LDLCTVQSGPVCRS

SEQ ID NO: 1510 - protein, 14 aa, Artificial Sequence
  Description of Artificial Sequence: Synthetic peptide
IDFCVIYHWPVCRR

SEQ ID NO: 1511 - protein, 14 aa, Artificial Sequence
  Description of Artificial Sequence: Synthetic peptide
IDFCVLYDWPVCQG

SEQ ID NO: 1512 - protein, 14 aa, Artificial Sequence
  Description of Artificial Sequence: Synthetic peptide
LDFCVLYRWPICST

SEQ ID NO: 1513 - protein, 14 aa, Artificial Sequence
  Description of Artificial Sequence: Synthetic peptide
VDFCVVYQWPICGQ

SEQ ID NO: 1514 - protein, 14 aa, Artificial Sequence
  Description of Artificial Sequence: Synthetic peptide
VDFCWIYRWPVCLA

SEQ ID NO: 1515 - protein, 14 aa, Artificial Sequence
  Description of Artificial Sequence: Synthetic peptide
VDFCWIYEWPICLN

SEQ ID NO: 1516 - protein, 14 aa, Artificial Sequence
  Description of Artificial Sequence: Synthetic peptide
TDFCWIYDWPVCHQ

SEQ ID NO: 1517 - protein, 14 aa, Artificial Sequence
  Description of Artificial Sequence: Synthetic peptide
VDFCWLYKWPVCFQ

SEQ ID NO: 1518 - protein, 14 aa, Artificial Sequence
  Description of Artificial Sequence: Synthetic peptide
VDFCWLYKWPVCEN

SEQ ID NO: 1519 - protein, 14 aa, Artificial Sequence
  Description of Artificial Sequence: Synthetic peptide
EDFCWLYKWPVCTL

SEQ ID NO: 1520 - protein, 14 aa, Artificial Sequence
  Description of Artificial Sequence: Synthetic peptide
VDFCWLYEWPVCQN

SEQ ID NO: 1521 - protein, 14 aa, Artificial Sequence
  Description of Artificial Sequence: Synthetic peptide
VDFCWMYDWPVCRE

SEQ ID NO: 1522 - protein, 14 aa, Artificial Sequence
  Description of Artificial Sequence: Synthetic peptide
EDFCWMYAWPVCGI

SEQ ID NO: 1523 - protein, 14 aa, Artificial Sequence
  Description of Artificial Sequence: Synthetic peptide
VDFCYEYDWPVCHT

SEQ ID NO: 1524 - protein, 14 aa, Artificial Sequence
  Description of Artificial Sequence: Synthetic peptide
PDFCYINNWPVCVT

SEQ ID NO: 1525 - protein, 14 aa, Artificial Sequence
  Description of Artificial Sequence: Synthetic peptide
PDFCYIYKWPICTE

SEQ ID NO: 1526 - protein, 14 aa, Artificial Sequence
  Description of Artificial Sequence: Synthetic peptide
IDFCYIYDWPVCYT

SEQ ID NO: 1527 - protein, 14 aa, Artificial Sequence
  Description of Artificial Sequence: Synthetic peptide
LDFCYINKWPVCWE

SEQ ID NO: 1528 - protein, 14 aa, Artificial Sequence
  Description of Artificial Sequence: Synthetic peptide
VDFCYLYSWPICTK

SEQ ID NO: 1529 - protein, 14 aa, Artificial Sequence
  Description of Artificial Sequence: Synthetic peptide
VDFCYLFNWPVCWE

SEQ ID NO: 1530 - protein, 14 aa, Artificial Sequence
  Description of Artificial Sequence: Synthetic peptide
VDFCYLYDWPVCNS

SEQ ID NO: 1531 - protein, 14 aa, Artificial Sequence
  Description of Artificial Sequence: Synthetic peptide
VDFCYLYSWPVCVQ

SEQ ID NO: 1532 - protein, 14 aa, Artificial Sequence
  Description of Artificial Sequence: Synthetic peptide
VDFCYLFDWPVCPN

SEQ ID NO: 1533 - protein, 14 aa, Artificial Sequence
  Description of Artificial Sequence: Synthetic peptide
FDFCYLYDWPVCWG

SEQ ID NO: 1534 - protein, 14 aa, Artificial Sequence
  Description of Artificial Sequence: Synthetic peptide
MDFCYLYRWPICGM

SEQ ID NO: 1535 - protein, 14 aa, Artificial Sequence
  Description of Artificial Sequence: Synthetic peptide
PDFCYMYNWPVCVT

SEQ ID NO: 1536 - protein, 14 aa, Artificial Sequence
  Description of Artificial Sequence: Synthetic peptide
PDFCYMYGWPICDS

SEQ ID NO: 1537 - protein, 14 aa, Artificial Sequence
  Description of Artificial Sequence: Synthetic peptide
VDFCYMYRWPVCLN

SEQ ID NO: 1538 - protein, 14 aa, Artificial Sequence
  Description of Artificial Sequence: Synthetic peptide
PDFCYMYRWPVCMS

SEQ ID NO: 1539 - protein, 14 aa, Artificial Sequence
  Description of Artificial Sequence: Synthetic peptide
PDFCYMYGWPICDT

SEQ ID NO: 1540 - protein, 14 aa, Artificial Sequence
  Description of Artificial Sequence: Synthetic peptide
VDFCYMYGWPVCRM

SEQ ID NO: 1541 - protein, 14 aa, Artificial Sequence
  Description of Artificial Sequence: Synthetic peptide
VDFCYMYNWPVCVP

SEQ ID NO: 1542 - protein, 14 aa, Artificial Sequence
  Description of Artificial Sequence: Synthetic peptide
VDFCYMYGWPVCAA

SEQ ID NO: 1543 - protein, 14 aa, Artificial Sequence
  Description of Artificial Sequence: Synthetic peptide
LDFCYMYGWPICAS

SEQ ID NO: 1544 - protein, 14 aa, Artificial Sequence
  Description of Artificial Sequence: Synthetic peptide
VDFCYMYDWPVCVR

SEQ ID NO: 1545 - protein, 14 aa, Artificial Sequence
  Description of Artificial Sequence: Synthetic peptide
VDFCYMYAWPVCMA

SEQ ID NO: 1546 - protein, 14 aa, Artificial Sequence
  Description of Artificial Sequence: Synthetic peptide
EDFCYMYRWPVCYR

SEQ ID NO: 1547 - protein, 14 aa, Artificial Sequence
  Description of Artificial Sequence: Synthetic peptide
VDFCYMYGWPVCVQ

SEQ ID NO: 1548 - protein, 14 aa, Artificial Sequence
  Description of Artificial Sequence: Synthetic peptide
ADFCYMYDWPVCSK

SEQ ID NO: 1549 - protein, 14 aa, Artificial Sequence
  Description of Artificial Sequence: Synthetic peptide
EDFCYRYNWPVCKL

SEQ ID NO: 1550 - protein, 14 aa, Artificial Sequence
  Description of Artificial Sequence: Synthetic peptide
FDFCYRYNWPICTK

SEQ ID NO: 1551 - protein, 14 aa, Artificial Sequence
  Description of Artificial Sequence: Synthetic peptide
VDFCYRYNWPLCRV

SEQ ID NO: 1552 - protein, 14 aa, Artificial Sequence
  Description of Artificial Sequence: Synthetic peptide
IDFCYRYGWPVCGT

SEQ ID NO: 1553 - protein, 14 aa, Artificial Sequence
  Description of Artificial Sequence: Synthetic peptide
IDFCYRYGWPVCQT

SEQ ID NO: 1554 - protein, 14 aa, Artificial Sequence
  Description of Artificial Sequence: Synthetic peptide
IDFCYRYGWPVCYT

SEQ ID NO: 1555 - protein, 14 aa, Artificial Sequence
  Description of Artificial Sequence: Synthetic peptide
VDFCYVYDWPVCSS

SEQ ID NO: 1556 - protein, 14 aa, Artificial Sequence
  Description of Artificial Sequence: Synthetic peptide
IDFCQLYHWPVCRA

SEQ ID NO: 1557 - protein, 14 aa, Artificial Sequence
  Description of Artificial Sequence: Synthetic peptide
VDFCALYNWPVCAI

SEQ ID NO: 1558 - protein, 14 aa, Artificial Sequence
  Description of Artificial Sequence: Synthetic peptide
FDFCFMYHWPVCKD

SEQ ID NO: 1559 - protein, 14 aa, Artificial Sequence
  Description of Artificial Sequence: Synthetic peptide
IDFCEIYRWPVCYD

SEQ ID NO: 1560 - protein, 14 aa, Artificial Sequence
  Description of Artificial Sequence: Synthetic peptide
VDFCTMYEWPICEK

SEQ ID NO: 1561 - protein, 14 aa, Artificial Sequence
  Description of Artificial Sequence: Synthetic peptide
VDWCYMYAWPVCSQ

SEQ ID NO: 1562 - protein, 14 aa, Artificial Sequence
  Description of Artificial Sequence: Synthetic peptide
IDFCFIYRWPVCSY

SEQ ID NO: 1563 - protein, 14 aa, Artificial Sequence
  Description of Artificial Sequence: Synthetic peptide
IDFCTLYNWPICDG

SEQ ID NO: 1564 - protein, 14 aa, Artificial Sequence
  Description of Artificial Sequence: Synthetic peptide
LDFCAIYDWPVCEQ

SEQ ID NO: 1565 - protein, 14 aa, Artificial Sequence
  Description of Artificial Sequence: Synthetic peptide
LDFCALYDWPVCKE

SEQ ID NO: 1566 - protein, 14 aa, Artificial Sequence
  Description of Artificial Sequence: Synthetic peptide
LDFCEVYRWPICGV

SEQ ID NO: 1567 - protein, 14 aa, Artificial Sequence
  Description of Artificial Sequence: Synthetic peptide
LDFCKIYRWPVCTP

SEQ ID NO: 1568 - protein, 14 aa, Artificial Sequence
  Description of Artificial Sequence: Synthetic peptide
LDFCKLYKWPICTT

SEQ ID NO: 1569 - protein, 14 aa, Artificial Sequence
  Description of Artificial Sequence: Synthetic peptide
LDFCRVYKWPVCDM

SEQ ID NO: 1570 - protein, 14 aa, Artificial Sequence
  Description of Artificial Sequence: Synthetic peptide
LDFCSLYDWPICRS

SEQ ID NO: 1571 - protein, 14 aa, Artificial Sequence
  Description of Artificial Sequence: Synthetic peptide
LDFCSMYNWPVCSV

SEQ ID NO: 1572 - protein, 14 aa, Artificial Sequence
  Description of Artificial Sequence: Synthetic peptide
PDFCAMYSWPVCVK

SEQ ID NO: 1573 - protein, 14 aa, Artificial Sequence
  Description of Artificial Sequence: Synthetic peptide
PDFCKLYKWPVCIQ

SEQ ID NO: 1574 - protein, 14 aa, Artificial Sequence
  Description of Artificial Sequence: Synthetic peptide
TDFCLLYNWPVCQH

SEQ ID NO: 1575 - protein, 14 aa, Artificial Sequence
  Description of Artificial Sequence: Synthetic peptide
VDFCAFYDWPVCDM

SEQ ID NO: 1576 - protein, 14 aa, Artificial Sequence
  Description of Artificial Sequence: Synthetic peptide
VDFCYHYNWPVCNF

SEQ ID NO: 1577 - protein, 14 aa, Artificial Sequence
  Description of Artificial Sequence: Synthetic peptide
VDFCYLFNWPVCGK

SEQ ID NO: 1578 - protein, 14 aa, Artificial Sequence
  Description of Artificial Sequence: Synthetic peptide
ADFCAMYHWPMCDQ

SEQ ID NO: 1579 - protein, 14 aa, Artificial Sequence
  Description of Artificial Sequence: Synthetic peptide
ADFCYLYHWPVCYV

SEQ ID NO: 1580 - protein, 14 aa, Artificial Sequence
  Description of Artificial Sequence: Synthetic peptide
DEFCIQYRWPICES

SEQ ID NO: 1581 - protein, 14 aa, Artificial Sequence
  Description of Artificial Sequence: Synthetic peptide
EDFCALYRWPVCLS

SEQ ID NO: 1582 - protein, 14 aa, Artificial Sequence
  Description of Artificial Sequence: Synthetic peptide
EDFCEWYHWPVCAN

SEQ ID NO: 1583 - protein, 14 aa, Artificial Sequence
  Description of Artificial Sequence: Synthetic peptide
EDFCFFYNWPVCAA

SEQ ID NO: 1584 - protein, 14 aa, Artificial Sequence
  Description of Artificial Sequence: Synthetic peptide
EDFCLIYDWPVCVQ

SEQ ID NO: 1585 - protein, 14 aa, Artificial Sequence
  Description of Artificial Sequence: Synthetic peptide
EDFCMLYRWPVCVS

SEQ ID NO: 1586 - protein, 14 aa, Artificial Sequence
  Description of Artificial Sequence: Synthetic peptide
ENFCAMYNWPVCNL

SEQ ID NO: 1587 - protein, 14 aa, Artificial Sequence
  Description of Artificial Sequence: Synthetic peptide
FDFCAMYMWPVCLM

SEQ ID NO: 1588 - protein, 14 aa, Artificial Sequence
  Description of Artificial Sequence: Synthetic peptide
FDFCDVYYWPVCHA

SEQ ID NO: 1589 - protein, 14 aa, Artificial Sequence
  Description of Artificial Sequence: Synthetic peptide
FDFCEVYKWPVCYL

SEQ ID NO: 1590 - protein, 14 aa, Artificial Sequence
  Description of Artificial Sequence: Synthetic peptide
FDFCSKYKWPICDG

SEQ ID NO: 1591 - protein, 14 aa, Artificial Sequence
  Description of Artificial Sequence: Synthetic peptide
GNFCATYAWPICVN

SEQ ID NO: 1592 - protein, 14 aa, Artificial Sequence
  Description of Artificial Sequence: Synthetic peptide
IDFCAIYQWPVCWN

SEQ ID NO: 1593 - protein, 14 aa, Artificial Sequence
  Description of Artificial Sequence: Synthetic peptide
IDFCAMYHWPICDK

SEQ ID NO: 1594 - protein, 14 aa, Artificial Sequence
  Description of Artificial Sequence: Synthetic peptide
IDFCAMYQWPVCKS

SEQ ID NO: 1595 - protein, 14 aa, Artificial Sequence
  Description of Artificial Sequence: Synthetic peptide
IDFCAMYRWPICNI

SEQ ID NO: 1596 - protein, 14 aa, Artificial Sequence
  Description of Artificial Sequence: Synthetic peptide
IDFCAVYKWPMCQI

SEQ ID NO: 1597 - protein, 14 aa, Artificial Sequence
  Description of Artificial Sequence: Synthetic peptide
IDFCAVYSWPVCYL

SEQ ID NO: 1598 - protein, 14 aa, Artificial Sequence
  Description of Artificial Sequence: Synthetic peptide
IDFCDIYRWPVCSQ

SEQ ID NO: 1599 - protein, 14 aa, Artificial Sequence
  Description of Artificial Sequence: Synthetic peptide
IDFCDMYQWPICDT

SEQ ID NO: 1600 - protein, 14 aa, Artificial Sequence
  Description of Artificial Sequence: Synthetic peptide
IDFCEIFSWPVCRP

SEQ ID NO: 1601 - protein, 14 aa, Artificial Sequence
  Description of Artificial Sequence: Synthetic peptide
IDFCFLYQWPICDT

SEQ ID NO: 1602 - protein, 14 aa, Artificial Sequence
  Description of Artificial Sequence: Synthetic peptide
IDFCIIYRWPVCLV

SEQ ID NO: 1603 - protein, 14 aa, Artificial Sequence
  Description of Artificial Sequence: Synthetic peptide
IDFCKIYVWPICNS

SEQ ID NO: 1604 - protein, 14 aa, Artificial Sequence
  Description of Artificial Sequence: Synthetic peptide
IDFCKVYKWPVCMN

SEQ ID NO: 1605 - protein, 14 aa, Artificial Sequence
  Description of Artificial Sequence: Synthetic peptide
IDFCMLYHWPICDG

SEQ ID NO: 1606 - protein, 14 aa, Artificial Sequence
  Description of Artificial Sequence: Synthetic peptide
IDFCMMFDWPICTK

SEQ ID NO: 1607 - protein, 14 aa, Artificial Sequence
  Description of Artificial Sequence: Synthetic peptide
IDFCPMYQWTICIT

SEQ ID NO: 1608 - protein, 14 aa, Artificial Sequence
  Description of Artificial Sequence: Synthetic peptide
IDFCQMYRWPVCYG

SEQ ID NO: 1609 - protein, 14 aa, Artificial Sequence
  Description of Artificial Sequence: Synthetic peptide
IDFCRMYKWPVCYG

SEQ ID NO: 1610 - protein, 14 aa, Artificial Sequence
  Description of Artificial Sequence: Synthetic peptide
IDFCRVYDWPVCSL

SEQ ID NO: 1611 - protein, 14 aa, Artificial Sequence
  Description of Artificial Sequence: Synthetic peptide
IDFCSIYWWPVCQE

SEQ ID NO: 1612 - protein, 14 aa, Artificial Sequence
  Description of Artificial Sequence: Synthetic peptide
IDFCSLYEWPVCWS

SEQ ID NO: 1613 - protein, 14 aa, Artificial Sequence
  Description of Artificial Sequence: Synthetic peptide
IDFCSLYTWPVCQT

SEQ ID NO: 1614 - protein, 14 aa, Artificial Sequence
  Description of Artificial Sequence: Synthetic peptide
IDFCSVYYWPVCNS

SEQ ID NO: 1615 - protein, 14 aa, Artificial Sequence
  Description of Artificial Sequence: Synthetic peptide
IDFCVLYEWPVCGT

SEQ ID NO: 1616 - protein, 14 aa, Artificial Sequence
  Description of Artificial Sequence: Synthetic peptide
IDFCWMYQWPVCDY

SEQ ID NO: 1617 - protein, 14 aa, Artificial Sequence
  Description of Artificial Sequence: Synthetic peptide
IDFCWQYGWPVCYG

SEQ ID NO: 1618 - protein, 14 aa, Artificial Sequence
  Description of Artificial Sequence: Synthetic peptide
IDFCYLYQWPICTK

SEQ ID NO: 1619 - protein, 14 aa, Artificial Sequence
  Description of Artificial Sequence: Synthetic peptide
INFCRIYDWPVCHD

SEQ ID NO: 1620 - protein, 14 aa, Artificial Sequence
  Description of Artificial Sequence: Synthetic peptide
KDFCYWYQWPICGD

SEQ ID NO: 1621 - protein, 14 aa, Artificial Sequence
  Description of Artificial Sequence: Synthetic peptide
LDFCALNRWPVCQA

SEQ ID NO: 1622 - protein, 14 aa, Artificial Sequence
  Description of Artificial Sequence: Synthetic peptide
LDFCALYRWPVCQA

SEQ ID NO: 1623 - protein, 14 aa, Artificial Sequence
  Description of Artificial Sequence: Synthetic peptide
LDFCALYRWPVCSV

SEQ ID NO: 1624 - protein, 14 aa, Artificial Sequence
  Description of Artificial Sequence: Synthetic peptide
LDFCAMYKWPVCRS

SEQ ID NO: 1625 - protein, 14 aa, Artificial Sequence
  Description of Artificial Sequence: Synthetic peptide
LDFCELYRWPVCWM

SEQ ID NO: 1626 - protein, 14 aa, Artificial Sequence
  Description of Artificial Sequence: Synthetic peptide
LDFCEMYQWPVCRH

SEQ ID NO: 1627 - protein, 14 aa, Artificial Sequence
  Description of Artificial Sequence: Synthetic peptide
LDFCERYAWPICYG

SEQ ID NO: 1628 - protein, 14 aa, Artificial Sequence
  Description of Artificial Sequence: Synthetic peptide
LDFCKINDWPICGH

SEQ ID NO: 1629 - protein, 14 aa, Artificial Sequence
  Description of Artificial Sequence: Synthetic peptide
LDFCKINGWPVCYT

SEQ ID NO: 1630 - protein, 14 aa, Artificial Sequence
  Description of Artificial Sequence: Synthetic peptide
LDFCKIYDWPICDH

SEQ ID NO: 1631 - protein, 14 aa, Artificial Sequence
  Description of Artificial Sequence: Synthetic peptide
LDFCKLYRWPVCIQ

SEQ ID NO: 1632 - protein, 14 aa, Artificial Sequence
  Description of Artificial Sequence: Synthetic peptide
LDFCKVYSWPICRV

SEQ ID NO: 1633 - protein, 14 aa, Artificial Sequence
  Description of Artificial Sequence: Synthetic peptide
LDFCLMYNWPVCSH

SEQ ID NO: 1634 - protein, 14 aa, Artificial Sequence
  Description of Artificial Sequence: Synthetic peptide
LDFCMFYNWPVCQH

SEQ ID NO: 1635 - protein, 14 aa, Artificial Sequence
  Description of Artificial Sequence: Synthetic peptide
LDFCQIYKWPVCTQ

SEQ ID NO: 1636 - protein, 14 aa, Artificial Sequence
  Description of Artificial Sequence: Synthetic peptide
LDFCRFYDWPVCQI

SEQ ID NO: 1637 - protein, 14 aa, Artificial Sequence
  Description of Artificial Sequence: Synthetic peptide
LDFCRIYRWPVCVS

SEQ ID NO: 1638 - protein, 14 aa, Artificial Sequence
  Description of Artificial Sequence: Synthetic peptide
LDFCSIYHWPVCGD

SEQ ID NO: 1639 - protein, 14 aa, Artificial Sequence
  Description of Artificial Sequence: Synthetic peptide
LDFCSMYDWPVCNV

SEQ ID NO: 1640 - protein, 14 aa, Artificial Sequence
  Description of Artificial Sequence: Synthetic peptide
LDFCSMYRWPVCVG

SEQ ID NO: 1641 - protein, 14 aa, Artificial Sequence
  Description of Artificial Sequence: Synthetic peptide
LDFCYLYGWPICYR

SEQ ID NO: 1642 - protein, 14 aa, Artificial Sequence
  Description of Artificial Sequence: Synthetic peptide
LNFCDTYHWPICGG

SEQ ID NO: 1643 - protein, 14 aa, Artificial Sequence
  Description of Artificial Sequence: Synthetic peptide
LNFCERYHWPICGD

SEQ ID NO: 1644 - protein, 14 aa, Artificial Sequence
  Description of Artificial Sequence: Synthetic peptide
MDFCFIYGWPVCRY

SEQ ID NO: 1645 - protein, 14 aa, Artificial Sequence
  Description of Artificial Sequence: Synthetic peptide
MDFCFLYNWPVCDA

SEQ ID NO: 1646 - protein, 14 aa, Artificial Sequence
  Description of Artificial Sequence: Synthetic peptide
MDFCGYYHWPICDE

SEQ ID NO: 1647 - protein, 14 aa, Artificial Sequence
  Description of Artificial Sequence: Synthetic peptide
MDFCKMYMWPICAT

SEQ ID NO: 1648 - protein, 14 aa, Artificial Sequence
  Description of Artificial Sequence: Synthetic peptide
MDFCLLYDWPVCRM

SEQ ID NO: 1649 - protein, 14 aa, Artificial Sequence
  Description of Artificial Sequence: Synthetic peptide
MDFCQVYAWPICNM

SEQ ID NO: 1650 - protein, 14 aa, Artificial Sequence
  Description of Artificial Sequence: Synthetic peptide
MDFCRIYNWPVCNE

SEQ ID NO: 1651 - protein, 14 aa, Artificial Sequence
  Description of Artificial Sequence: Synthetic peptide
MDFCSFYHWPICKS

SEQ ID NO: 1652 - protein, 14 aa, Artificial Sequence
  Description of Artificial Sequence: Synthetic peptide
PDFCAMYRWPVCVG

SEQ ID NO: 1653 - protein, 14 aa, Artificial Sequence
  Description of Artificial Sequence: Synthetic peptide
PDFCHLYRWPVCEW

SEQ ID NO: 1654 - protein, 14 aa, Artificial Sequence
  Description of Artificial Sequence: Synthetic peptide
PDFCLLYGWPVCMT

SEQ ID NO: 1655 - protein, 14 aa, Artificial Sequence
  Description of Artificial Sequence: Synthetic peptide
PDFCRLYHWPVCLA

SEQ ID NO: 1656 - protein, 14 aa, Artificial Sequence
  Description of Artificial Sequence: Synthetic peptide
PDFCYIYAWPICDS

SEQ ID NO: 1657 - protein, 14 aa, Artificial Sequence
  Description of Artificial Sequence: Synthetic peptide
PDFCYMYMWPICAQ

SEQ ID NO: 1658 - protein, 14 aa, Artificial Sequence
  Description of Artificial Sequence: Synthetic peptide
TDFCGIYRWPVCFH

SEQ ID NO: 1659 - protein, 14 aa, Artificial Sequence
  Description of Artificial Sequence: Synthetic peptide
VDFCAIFAWPVCMM

SEQ ID NO: 1660 - protein, 14 aa, Artificial Sequence
  Description of Artificial Sequence: Synthetic peptide
VDFCAIYHWPVCMG

SEQ ID NO: 1661 - protein, 14 aa, Artificial Sequence
  Description of Artificial Sequence: Synthetic peptide
VDFCAIYSWPVCRT

SEQ ID NO: 1662 - protein, 14 aa, Artificial Sequence
  Description of Artificial Sequence: Synthetic peptide
VDFCALYQWPVCWQ

SEQ ID NO: 1663 - protein, 14 aa, Artificial Sequence
  Description of Artificial Sequence: Synthetic peptide
VDFCAMYRWPVCTS

SEQ ID NO: 1664 - protein, 14 aa, Artificial Sequence
  Description of Artificial Sequence: Synthetic peptide
VDFCAVYAWPVCAT

SEQ ID NO: 1665 - protein, 14 aa, Artificial Sequence
  Description of Artificial Sequence: Synthetic peptide
VDFCAVYEWPVCDT

SEQ ID NO: 1666 - protein, 14 aa, Artificial Sequence
  Description of Artificial Sequence: Synthetic peptide
VDFCAVYNWPVCGL

SEQ ID NO: 1667 - protein, 14 aa, Artificial Sequence
  Description of Artificial Sequence: Synthetic peptide
VDFCAVYRWPVCHA

SEQ ID NO: 1668 - protein, 14 aa, Artificial Sequence
  Description of Artificial Sequence: Synthetic peptide
VDFCEFYHWPICYQ

SEQ ID NO: 1669 - protein, 14 aa, Artificial Sequence
  Description of Artificial Sequence: Synthetic peptide
VDFCELYRWPVCQV

SEQ ID NO: 1670 - protein, 14 aa, Artificial Sequence
  Description of Artificial Sequence: Synthetic peptide
VDFCELYSWPVCYQ

SEQ ID NO: 1671 - protein, 14 aa, Artificial Sequence
  Description of Artificial Sequence: Synthetic peptide
VDFCELYWWPVCDR

SEQ ID NO: 1672 - protein, 14 aa, Artificial Sequence
  Description of Artificial Sequence: Synthetic peptide
VDFCEMFHWPVCLR

SEQ ID NO: 1673 - protein, 14 aa, Artificial Sequence
  Description of Artificial Sequence: Synthetic peptide
VDFCEMYHWPICYQ

SEQ ID NO: 1674 - protein, 14 aa, Artificial Sequence
  Description of Artificial Sequence: Synthetic peptide
VDFCEMYRWPVCTG

SEQ ID NO: 1675 - protein, 14 aa, Artificial Sequence
  Description of Artificial Sequence: Synthetic peptide
VDFCEVFHWPVCDQ

SEQ ID NO: 1676 - protein, 14 aa, Artificial Sequence
  Description of Artificial Sequence: Synthetic peptide
VDFCEVYHWPVCLG

SEQ ID NO: 1677 - protein, 14 aa, Artificial Sequence
  Description of Artificial Sequence: Synthetic peptide
VDFCEVYRWPVCLG

SEQ ID NO: 1678 - protein, 14 aa, Artificial Sequence
  Description of Artificial Sequence: Synthetic peptide
VDFCFLYPWPICYQ

SEQ ID NO: 1679 - protein, 14 aa, Artificial Sequence
  Description of Artificial Sequence: Synthetic peptide
VDFCGFYHWPICYS

SEQ ID NO: 1680 - protein, 14 aa, Artificial Sequence
  Description of Artificial Sequence: Synthetic peptide
VDFCGIYQWPVCIQ

SEQ ID NO: 1681 - protein, 14 aa, Artificial Sequence
  Description of Artificial Sequence: Synthetic peptide
VDFCGIYRWPICEN

SEQ ID NO: 1682 - protein, 14 aa, Artificial Sequence
  Description of Artificial Sequence: Synthetic peptide
VDFCGLFRWPICTD

SEQ ID NO: 1683 - protein, 14 aa, Artificial Sequence
  Description of Artificial Sequence: Synthetic peptide
VDFCGLYHWPVCWT

SEQ ID NO: 1684 - protein, 14 aa, Artificial Sequence
  Description of Artificial Sequence: Synthetic peptide
VDFCKIFQWPVCVD

SEQ ID NO: 1685 - protein, 14 aa, Artificial Sequence
  Description of Artificial Sequence: Synthetic peptide
VDFCKIYAWPICES

SEQ ID NO: 1686 - protein, 14 aa, Artificial Sequence
  Description of Artificial Sequence: Synthetic peptide
VDFCKIYSWPVCSY

SEQ ID NO: 1687 - protein, 14 aa, Artificial Sequence
  Description of Artificial Sequence: Synthetic peptide
VDFCKLFQWPVCAG

SEQ ID NO: 1688 - protein, 14 aa, Artificial Sequence
  Description of Artificial Sequence: Synthetic peptide
VDFCKLYKWPVCAV

SEQ ID NO: 1689 - protein, 14 aa, Artificial Sequence
  Description of Artificial Sequence: Synthetic peptide
VDFCKLYKWPVCTA

SEQ ID NO: 1690 - protein, 14 aa, Artificial Sequence
  Description of Artificial Sequence: Synthetic peptide
VDFCKLYNWPVCPG

SEQ ID NO: 1691 - protein, 14 aa, Artificial Sequence
  Description of Artificial Sequence: Synthetic peptide
VDFCKLYRWPVCGL

SEQ ID NO: 1692 - protein, 14 aa, Artificial Sequence
  Description of Artificial Sequence: Synthetic peptide
VDFCKVYRWPVCLA

SEQ ID NO: 1693 - protein, 14 aa, Artificial Sequence
  Description of Artificial Sequence: Synthetic peptide
VDFCLIYHWPVCYV

SEQ ID NO: 1694 - protein, 14 aa, Artificial Sequence
  Description of Artificial Sequence: Synthetic peptide
VDFCLIYNWPVCLQ

SEQ ID NO: 1695 - protein, 14 aa, Artificial Sequence
  Description of Artificial Sequence: Synthetic peptide
VDFCLLYDWPVCNG

SEQ ID NO: 1696 - protein, 14 aa, Artificial Sequence
  Description of Artificial Sequence: Synthetic peptide
VDFCLLYDWPVCSK

SEQ ID NO: 1697 - protein, 14 aa, Artificial Sequence
  Description of Artificial Sequence: Synthetic peptide
VDFCLLYRWPVCVQ

SEQ ID NO: 1698 - protein, 14 aa, Artificial Sequence
  Description of Artificial Sequence: Synthetic peptide
VDFCLMYHWPVCSQ

SEQ ID NO: 1699 - protein, 14 aa, Artificial Sequence
  Description of Artificial Sequence: Synthetic peptide
VDFCLVYRWPICTQ

SEQ ID NO: 1700 - protein, 14 aa, Artificial Sequence
  Description of Artificial Sequence: Synthetic peptide
VDFCMLYAWPVCHQ

SEQ ID NO: 1701 - protein, 14 aa, Artificial Sequence
  Description of Artificial Sequence: Synthetic peptide
VDFCMLYHWPICYQ

SEQ ID NO: 1702 - protein, 14 aa, Artificial Sequence
  Description of Artificial Sequence: Synthetic peptide
VDFCMVYRWPVCDN

SEQ ID NO: 1703 - protein, 14 aa, Artificial Sequence
  Description of Artificial Sequence: Synthetic peptide
VDFCQLYDWPVCNS

SEQ ID NO: 1704 - protein, 14 aa, Artificial Sequence
  Description of Artificial Sequence: Synthetic peptide
VDFCQLYNWPVCLK

SEQ ID NO: 1705 - protein, 14 aa, Artificial Sequence
  Description of Artificial Sequence: Synthetic peptide
VDFCQMYRWPVCYG

SEQ ID NO: 1706 - protein, 14 aa, Artificial Sequence
  Description of Artificial Sequence: Synthetic peptide
VDFCQMYSWPVCAT

SEQ ID NO: 1707 - protein, 14 aa, Artificial Sequence
  Description of Artificial Sequence: Synthetic peptide
VDFCRIYHWPVCKH

SEQ ID NO: 1708 - protein, 14 aa, Artificial Sequence
  Description of Artificial Sequence: Synthetic peptide
VDFCRLYDWPVCMT

SEQ ID NO: 1709 - protein, 14 aa, Artificial Sequence
  Description of Artificial Sequence: Synthetic peptide
VDFCRLYDWPVCSG

SEQ ID NO: 1710 - protein, 14 aa, Artificial Sequence
  Description of Artificial Sequence: Synthetic peptide
VDFCRLYMWPICLE

SEQ ID NO: 1711 - protein, 14 aa, Artificial Sequence
  Description of Artificial Sequence: Synthetic peptide
VDFCRLYNWPVCIT

SEQ ID NO: 1712 - protein, 14 aa, Artificial Sequence
  Description of Artificial Sequence: Synthetic peptide
VDFCRLYRWPICQH

SEQ ID NO: 1713 - protein, 14 aa, Artificial Sequence
  Description of Artificial Sequence: Synthetic peptide
VDFCRLYSWPVCDP

SEQ ID NO: 1714 - protein, 14 aa, Artificial Sequence
  Description of Artificial Sequence: Synthetic peptide
VDFCRMYAWPICDP

SEQ ID NO: 1715 - protein, 14 aa, Artificial Sequence
  Description of Artificial Sequence: Synthetic peptide
VDFCRMYAWPVCSH

SEQ ID NO: 1716 - protein, 14 aa, Artificial Sequence
  Description of Artificial Sequence: Synthetic peptide
VDFCRMYDWPVCTS

SEQ ID NO: 1717 - protein, 14 aa, Artificial Sequence
  Description of Artificial Sequence: Synthetic peptide
VDFCRMYSWPVCTT

SEQ ID NO: 1718 - protein, 14 aa, Artificial Sequence
  Description of Artificial Sequence: Synthetic peptide
VDFCSIYRWPVCNG

SEQ ID NO: 1719 - protein, 14 aa, Artificial Sequence
  Description of Artificial Sequence: Synthetic peptide
VDFCSLYHWPVCMR

SEQ ID NO: 1720 - protein, 14 aa, Artificial Sequence
  Description of Artificial Sequence: Synthetic peptide
VDFCSLYSWPVCEA

SEQ ID NO: 1721 - protein, 14 aa, Artificial Sequence
  Description of Artificial Sequence: Synthetic peptide
VDFCSMYAWPVCNY

SEQ ID NO: 1722 - protein, 14 aa, Artificial Sequence
  Description of Artificial Sequence: Synthetic peptide
VDFCSMYDWPVCTA

SEQ ID NO: 1723 - protein, 14 aa, Artificial Sequence
  Description of Artificial Sequence: Synthetic peptide
VDFCSMYRWPVCYE

SEQ ID NO: 1724 - protein, 14 aa, Artificial Sequence
  Description of Artificial Sequence: Synthetic peptide
VDFCSVYGWPVCNL

SEQ ID NO: 1725 - protein, 14 aa, Artificial Sequence
  Description of Artificial Sequence: Synthetic peptide
VDFCSVYYWPICQN

SEQ ID NO: 1726 - protein, 14 aa, Artificial Sequence
  Description of Artificial Sequence: Synthetic peptide
VDFCTIFHWPVCQS

SEQ ID NO: 1727 - protein, 14 aa, Artificial Sequence
  Description of Artificial Sequence: Synthetic peptide
VDFCTIYQWPICRS

SEQ ID NO: 1728 - protein, 14 aa, Artificial Sequence
  Description of Artificial Sequence: Synthetic peptide
VDFCTLYQWPVCLK

SEQ ID NO: 1729 - protein, 14 aa, Artificial Sequence
  Description of Artificial Sequence: Synthetic peptide
VDFCWLYQWPICNG

SEQ ID NO: 1730 - protein, 14 aa, Artificial Sequence
  Description of Artificial Sequence: Synthetic peptide
VDFCWLYQWPVCNS

SEQ ID NO: 1731 - protein, 14 aa, Artificial Sequence
  Description of Artificial Sequence: Synthetic peptide
VDFCWLYRWPVCTQ

SEQ ID NO: 1732 - protein, 14 aa, Artificial Sequence
  Description of Artificial Sequence: Synthetic peptide
VDFCWMYDWPVCRV

SEQ ID NO: 1733 - protein, 14 aa, Artificial Sequence
  Description of Artificial Sequence: Synthetic peptide
VDFCYLYGWPVCML

SEQ ID NO: 1734 - protein, 14 aa, Artificial Sequence
  Description of Artificial Sequence: Synthetic peptide
VDFCYLYQWPVCGK

SEQ ID NO: 1735 - protein, 14 aa, Artificial Sequence
  Description of Artificial Sequence: Synthetic peptide
VDFCYLYVWPVCLR

SEQ ID NO: 1736 - protein, 14 aa, Artificial Sequence
  Description of Artificial Sequence: Synthetic peptide
VDFCYMYGWPVCNP

SEQ ID NO: 1737 - protein, 14 aa, Artificial Sequence
  Description of Artificial Sequence: Synthetic peptide
VDFCYMYGWPVCRL

SEQ ID NO: 1738 - protein, 14 aa, Artificial Sequence
  Description of Artificial Sequence: Synthetic peptide
VDWCALYDWPVCEQ

SEQ ID NO: 1739 - protein, 14 aa, Artificial Sequence
  Description of Artificial Sequence: Synthetic peptide
VDWCHIYRWPVCDM

SEQ ID NO: 1740 - protein, 14 aa, Artificial Sequence
  Description of Artificial Sequence: Synthetic peptide
VDWCTLYAWPVCQQ

SEQ ID NO: 1741 - protein, 14 aa, Artificial Sequence
  Description of Artificial Sequence: Synthetic peptide
VNFCQIYEWPICTS

SEQ ID NO: 1742 - protein, 14 aa, Artificial Sequence
  Description of Artificial Sequence: Synthetic peptide
WKFCATSMWPNCVD

SEQ ID NO: 1743 - protein, 14 aa, Artificial Sequence
  Description of Artificial Sequence: Synthetic peptide
IDFCILYDWPVCEG

SEQ ID NO: 1744 - protein, 14 aa, Artificial Sequence
  Description of Artificial Sequence: Synthetic peptide
ADLCYLQPQPVCET

SEQ ID NO: 1745 - protein, 14 aa, Artificial Sequence
  Description of Artificial Sequence: Synthetic peptide
EDFCMRYNWPVCRE

SEQ ID NO: 1746 - protein, 14 aa, Artificial Sequence
  Description of Artificial Sequence: Synthetic peptide
EDFCQTYRWPICIY

SEQ ID NO: 1747 - protein, 14 aa, Artificial Sequence
  Description of Artificial Sequence: Synthetic peptide
GTFCPTSQWRYCII

SEQ ID NO: 1748 - protein, 14 aa, Artificial Sequence
  Description of Artificial Sequence: Synthetic peptide
IDFCERYSWPVCVT

SEQ ID NO: 1749 - protein, 14 aa, Artificial Sequence
  Description of Artificial Sequence: Synthetic peptide
LDFCWLYRWPVCEN

SEQ ID NO: 1750 - protein, 14 aa, Artificial Sequence
  Description of Artificial Sequence: Synthetic peptide
LEFCAWQLWSVCDD

SEQ ID NO: 1751 - protein, 14 aa, Artificial Sequence
  Description of Artificial Sequence: Synthetic peptide
LNFCAFYDWPICHT

SEQ ID NO: 1752 - protein, 14 aa, Artificial Sequence
  Description of Artificial Sequence: Synthetic peptide
PDFCEMYNWPVCDR

SEQ ID NO: 1753 - protein, 14 aa, Artificial Sequence
  Description of Artificial Sequence: Synthetic peptide
PDFCLLYKWPICPS

SEQ ID NO: 1754 - protein, 14 aa, Artificial Sequence
  Description of Artificial Sequence: Synthetic peptide
VDFCALYHWPICDT

SEQ ID NO: 1755 - protein, 14 aa, Artificial Sequence
  Description of Artificial Sequence: Synthetic peptide
VDFCGLYKWPVCSM

SEQ ID NO: 1756 - protein, 14 aa, Artificial Sequence
  Description of Artificial Sequence: Synthetic peptide
VDFCGMYKWPICNK

SEQ ID NO: 1757 - protein, 14 aa, Artificial Sequence
  Description of Artificial Sequence: Synthetic peptide
VDFCSVYDWPVCWG

SEQ ID NO: 1758 - protein, 14 aa, Artificial Sequence
  Description of Artificial Sequence: Synthetic peptide
VDFCWIYGWPVCQS

SEQ ID NO: 1759 - protein, 14 aa, Artificial Sequence
  Description of Artificial Sequence: Synthetic peptide
VDFCWLYRWPVCFD

SEQ ID NO: 1760 - protein, 14 aa, Artificial Sequence
  Description of Artificial Sequence: Synthetic peptide
VDWCGLYNWPVCTW

SEQ ID NO: 1761 - protein, 14 aa, Artificial Sequence
  Description of Artificial Sequence: Synthetic peptide
VEQCGLQSLRGCKV

SEQ ID NO: 1762 - protein, 14 aa, Artificial Sequence
  Description of Artificial Sequence: Synthetic peptide
WDFCFLYSWPVCDS

SEQ ID NO: 1763 - protein, 14 aa, Artificial Sequence
  Description of Artificial Sequence: Synthetic peptide
IDFCQIYGWPVCLG

SEQ ID NO: 1764 - protein, 14 aa, Artificial Sequence
  Description of Artificial Sequence: Synthetic peptide
IDFCLLYKWPVCDL

SEQ ID NO: 1765 - protein, 14 aa, Artificial Sequence
  Description of Artificial Sequence: Synthetic peptide
VDFCELYHWPICYQ

SEQ ID NO: 1766 - protein, 14 aa, Artificial Sequence
  Description of Artificial Sequence: Synthetic peptide
VDFCTLYDWPVCRK

SEQ ID NO: 1767 - protein, 14 aa, Artificial Sequence
  Description of Artificial Sequence: Synthetic peptide
LDFCEVNRWPICGV

SEQ ID NO: 1768 - protein, 14 aa, Artificial Sequence
  Description of Artificial Sequence: Synthetic peptide
IDFCMMFDWPVCNK

SEQ ID NO: 1769 - protein, 14 aa, Artificial Sequence
  Description of Artificial Sequence: Synthetic peptide
LDFCFFYDWPVCRN

SEQ ID NO: 1770 - protein, 14 aa, Artificial Sequence
  Description of Artificial Sequence: Synthetic peptide
PDFCVLYHWPICAA

SEQ ID NO: 1771 - protein, 14 aa, Artificial Sequence
  Description of Artificial Sequence: Synthetic peptide
VDFCAIYSWPICKT

SEQ ID NO: 1772 - protein, 14 aa, Artificial Sequence
  Description of Artificial Sequence: Synthetic peptide
VDFCLFYRWPICTE

SEQ ID NO: 1773 - protein, 14 aa, Artificial Sequence
  Description of Artificial Sequence: Synthetic peptide
VDFCLIYGWPICSS

SEQ ID NO: 1774 - protein, 14 aa, Artificial Sequence
  Description of Artificial Sequence: Synthetic peptide
WIFVGLMLALVGTI

SEQ ID NO: 1775 - protein, 14 aa, Artificial Sequence
  Description of Artificial Sequence: Synthetic peptide
FICWPDWEEDYFCA

SEQ ID NO: 1776 - protein, 14 aa, Artificial Sequence
  Description of Artificial Sequence: Synthetic peptide
GDCWPDWEWDFYCD

SEQ ID NO: 1777 - protein, 14 aa, Artificial Sequence
  Description of Artificial Sequence: Synthetic peptide
YLCWPDWEYIDLCD

SEQ ID NO: 1778 - protein, 14 aa, Artificial Sequence
  Description of Artificial Sequence: Synthetic peptide
SFCWPDWEEYFDCD

SEQ ID NO: 1779 - protein, 14 aa, Artificial Sequence
  Description of Artificial Sequence: Synthetic peptide
DDCWPDWEEYASCD

SEQ ID NO: 1780 - protein, 14 aa, Artificial Sequence
  Description of Artificial Sequence: Synthetic peptide
NLCWPDWEYPFFCD

SEQ ID NO: 1781 - protein, 14 aa, Artificial Sequence
  Description of Artificial Sequence: Synthetic peptide
FDCWPDWEESFVCD

SEQ ID NO: 1782 - protein, 14 aa, Artificial Sequence
  Description of Artificial Sequence: Synthetic peptide
DICGPDGDETIICD

SEQ ID NO: 1783 - protein, 14 aa, Artificial Sequence
  Description of Artificial Sequence: Synthetic peptide
DDCWPDWEYYAVCD

SEQ ID NO: 1784 - protein, 14 aa, Artificial Sequence
  Description of Artificial Sequence: Synthetic peptide
YDCWPDWEEYSNCD

SEQ ID NO: 1785 - protein, 14 aa, Artificial Sequence
  Description of Artificial Sequence: Synthetic peptide
INCWPDWEDYFFCD

SEQ ID NO: 1786 - protein, 14 aa, Artificial Sequence
  Description of Artificial Sequence: Synthetic peptide
NICWPDWEDDTFCF

SEQ ID NO: 1787 - protein, 14 aa, Artificial Sequence
  Description of Artificial Sequence: Synthetic peptide
NICWPDWEPNSFCF

SEQ ID NO: 1788 - protein, 14 aa, Artificial Sequence
  Description of Artificial Sequence: Synthetic peptide
YDCGPEMDESIDCF

SEQ ID NO: 1789 - protein, 14 aa, Artificial Sequence
  Description of Artificial Sequence: Synthetic peptide
DFCWPDWEFPFICH

SEQ ID NO: 1790 - protein, 14 aa, Artificial Sequence
  Description of Artificial Sequence: Synthetic peptide
DFCGPEMDESITCI

SEQ ID NO: 1791 - protein, 14 aa, Artificial Sequence
  Description of Artificial Sequence: Synthetic peptide
YDCGPEFDESTVCI

SEQ ID NO: 1792 - protein, 14 aa, Artificial Sequence
  Description of Artificial Sequence: Synthetic peptide
HDCWPDWEWDIFCI

SEQ ID NO: 1793 - protein, 14 aa, Artificial Sequence
  Description of Artificial Sequence: Synthetic peptide
HACWPDWEEYNPCN

SEQ ID NO: 1794 - protein, 14 aa, Artificial Sequence
  Description of Artificial Sequence: Synthetic peptide
DVCWPDWEWDFFCN

SEQ ID NO: 1795 - protein, 14 aa, Artificial Sequence
  Description of Artificial Sequence: Synthetic peptide
NYCWPDWEYYIPCN

SEQ ID NO: 1796 - protein, 14 aa, Artificial Sequence
  Description of Artificial Sequence: Synthetic peptide
IICWPDWEFIDYCN

SEQ ID NO: 1797 - protein, 14 aa, Artificial Sequence
  Description of Artificial Sequence: Synthetic peptide
SLCWPDWEYDIACP

SEQ ID NO: 1798 - protein, 14 aa, Artificial Sequence
  Description of Artificial Sequence: Synthetic peptide
DLCGPELDESIFCP

SEQ ID NO: 1799 - protein, 14 aa, Artificial Sequence
  Description of Artificial Sequence: Synthetic peptide
TNCWPDWEWVLPCP

SEQ ID NO: 1800 - protein, 14 aa, Artificial Sequence
  Description of Artificial Sequence: Synthetic peptide
IECWPDWEPNYFCP

SEQ ID NO: 1801 - protein, 14 aa, Artificial Sequence
  Description of Artificial Sequence: Synthetic peptide
IFCWPDWEDYVDCP

SEQ ID NO: 1802 - protein, 14 aa, Artificial Sequence
  Description of Artificial Sequence: Synthetic peptide
IDCWPDWEYDFFCP

SEQ ID NO: 1803 - protein, 14 aa, Artificial Sequence
  Description of Artificial Sequence: Synthetic peptide
LFCWPDWEDSFFCP

SEQ ID NO: 1804 - protein, 14 aa, Artificial Sequence
  Description of Artificial Sequence: Synthetic peptide
VDCWPDWEDYADCT

SEQ ID NO: 1805 - protein, 14 aa, Artificial Sequence
  Description of Artificial Sequence: Synthetic peptide
VICWPDWEQYFPCV

SEQ ID NO: 1806 - protein, 14 aa, Artificial Sequence
  Description of Artificial Sequence: Synthetic peptide
IECWPDWEPIYPCY

SEQ ID NO: 1807 - protein, 14 aa, Artificial Sequence
  Description of Artificial Sequence: Synthetic peptide
ITCWPDWEVYFPCY

SEQ ID NO: 1808 - protein, 14 aa, Artificial Sequence
  Description of Artificial Sequence: Synthetic peptide
IDCWPDWEYIHPCY

SEQ ID NO: 1809 - protein, 14 aa, Artificial Sequence
  Description of Artificial Sequence: Synthetic peptide
IDCWPDWEYINPCY

SEQ ID NO: 1810 - protein, 14 aa, Artificial Sequence
  Description of Artificial Sequence: Synthetic peptide
ADCWPDWEEAFPCY

SEQ ID NO: 1811 - protein, 14 aa, Artificial Sequence
  Description of Artificial Sequence: Synthetic peptide
IDCWPDWEYIYPCY

SEQ ID NO: 1812 - protein, 14 aa, Artificial Sequence
  Description of Artificial Sequence: Synthetic peptide
NICWPDWEDDNFCF

SEQ ID NO: 1813 - protein, 14 aa, Artificial Sequence
  Description of Artificial Sequence: Synthetic peptide
YDCWPDWEYVDACY

SEQ ID NO: 1814 - protein, 14 aa, Artificial Sequence
  Description of Artificial Sequence: Synthetic peptide
FYCGPDGDESYVCD

SEQ ID NO: 1815 - protein, 14 aa, Artificial Sequence
  Description of Artificial Sequence: Synthetic peptide
DICWPDWEYINICS

SEQ ID NO: 1816 - protein, 14 aa, Artificial Sequence
  Description of Artificial Sequence: Synthetic peptide
FVCWPDWEDFNFCD

SEQ ID NO: 1817 - protein, 14 aa, Artificial Sequence
  Description of Artificial Sequence: Synthetic peptide
FACWPDWEDYVACD

SEQ ID NO: 1818 - protein, 14 aa, Artificial Sequence
  Description of Artificial Sequence: Synthetic peptide
DNCWPDWEYDFFCV

SEQ ID NO: 1819 - protein, 14 aa, Artificial Sequence
  Description of Artificial Sequence: Synthetic peptide
YDCWPDWEEYNDCA

SEQ ID NO: 1820 - protein, 14 aa, Artificial Sequence
  Description of Artificial Sequence: Synthetic peptide
DDCGPDGDETIICV

SEQ ID NO: 1821 - protein, 14 aa, Artificial Sequence
  Description of Artificial Sequence: Synthetic peptide
FPCWPDWEEYAICD

SEQ ID NO: 1822 - protein, 14 aa, Artificial Sequence
  Description of Artificial Sequence: Synthetic peptide
PDCGPDGDESLFCT

SEQ ID NO: 1823 - protein, 14 aa, Artificial Sequence
  Description of Artificial Sequence: Synthetic peptide
DNCWPDWEYDYFCV

SEQ ID NO: 1824 - protein, 14 aa, Artificial Sequence
  Description of Artificial Sequence: Synthetic peptide
IFCWPDWEEFYDCY

SEQ ID NO: 1825 - protein, 14 aa, Artificial Sequence
  Description of Artificial Sequence: Synthetic peptide
ADCWPDWEEYFPCN

SEQ ID NO: 1826 - protein, 14 aa, Artificial Sequence
  Description of Artificial Sequence: Synthetic peptide
HTCWPDWEDDIFCN

SEQ ID NO: 1827 - protein, 14 aa, Artificial Sequence
  Description of Artificial Sequence: Synthetic peptide
FACWPDWEEAFLCL

SEQ ID NO: 1828 - protein, 14 aa, Artificial Sequence
  Description of Artificial Sequence: Synthetic peptide
YDCGPELDESIACD

SEQ ID NO: 1829 - protein, 14 aa, Artificial Sequence
  Description of Artificial Sequence: Synthetic peptide
NSCWPDWEYDIICD

SEQ ID NO: 1830 - protein, 14 aa, Artificial Sequence
  Description of Artificial Sequence: Synthetic peptide
FACWPDWEEVAPCY

SEQ ID NO: 1831 - protein, 14 aa, Artificial Sequence
  Description of Artificial Sequence: Synthetic peptide
LDCGPDGDETLTCY

SEQ ID NO: 1832 - protein, 14 aa, Artificial Sequence
  Description of Artificial Sequence: Synthetic peptide
VLCWPDWEEFYDCP

SEQ ID NO: 1833 - protein, 14 aa, Artificial Sequence
  Description of Artificial Sequence: Synthetic peptide
HACWPVWEEYFPCN

SEQ ID NO: 1834 - protein, 14 aa, Artificial Sequence
  Description of Artificial Sequence: Synthetic peptide
NECWPNGEPTFPCT

SEQ ID NO: 1835 - protein, 14 aa, Artificial Sequence
  Description of Artificial Sequence: Synthetic peptide
LTCGPDGDETLYCD

SEQ ID NO: 1836 - protein, 14 aa, Artificial Sequence
  Description of Artificial Sequence: Synthetic peptide
YDCGPEYDESVPCI

SEQ ID NO: 1837 - protein, 14 aa, Artificial Sequence
  Description of Artificial Sequence: Synthetic peptide
IECWPDWEPNSFCD

SEQ ID NO: 1838 - protein, 14 aa, Artificial Sequence
  Description of Artificial Sequence: Synthetic peptide
YDCGPELDESIHCY

SEQ ID NO: 1839 - protein, 14 aa, Artificial Sequence
  Description of Artificial Sequence: Synthetic peptide
IYCGPEFDESTICN

SEQ ID NO: 1840 - protein, 14 aa, Artificial Sequence
  Description of Artificial Sequence: Synthetic peptide
IYCGPEVEEAYLCY

SEQ ID NO: 1841 - protein, 14 aa, Artificial Sequence
  Description of Artificial Sequence: Synthetic peptide
FDCGPDGDETVYCD

SEQ ID NO: 1842 - protein, 14 aa, Artificial Sequence
  Description of Artificial Sequence: Synthetic peptide
IDCGPDGDETISCY

SEQ ID NO: 1843 - protein, 14 aa, Artificial Sequence
  Description of Artificial Sequence: Synthetic peptide
NYCGPEFDESSTCL

SEQ ID NO: 1844 - protein, 14 aa, Artificial Sequence
  Description of Artificial Sequence: Synthetic peptide
YDCGPDGDESYFCD

SEQ ID NO: 1845 - protein, 14 aa, Artificial Sequence
  Description of Artificial Sequence: Synthetic peptide
NFCWPDWEYFNDCN

SEQ ID NO: 1846 - protein, 14 aa, Artificial Sequence
  Description of Artificial Sequence: Synthetic peptide
VLCWPDWEAFFDCD

SEQ ID NO: 1847 - protein, 14 aa, Artificial Sequence
  Description of Artificial Sequence: Synthetic peptide
IYCGPEWEWPVACN

SEQ ID NO: 1848 - protein, 14 aa, Artificial Sequence
  Description of Artificial Sequence: Synthetic peptide
VFCWPDWEDNFFCN

SEQ ID NO: 1849 - protein, 14 aa, Artificial Sequence
  Description of Artificial Sequence: Synthetic peptide
VVCWPDWETFFPCD

SEQ ID NO: 1850 - protein, 14 aa, Artificial Sequence
  Description of Artificial Sequence: Synthetic peptide
DNCGPDGDETYICN

SEQ ID NO: 1851 - protein, 14 aa, Artificial Sequence
  Description of Artificial Sequence: Synthetic peptide
DNCWPDWEYNFFCV

SEQ ID NO: 1852 - protein, 14 aa, Artificial Sequence
  Description of Artificial Sequence: Synthetic peptide
FYCGPEVEEDYLCI

SEQ ID NO: 1853 - protein, 14 aa, Artificial Sequence
  Description of Artificial Sequence: Synthetic peptide
DNCWPDWEYDIFCV

SEQ ID NO: 1854 - protein, 14 aa, Artificial Sequence
  Description of Artificial Sequence: Synthetic peptide
IDCGPEFDESIACP

SEQ ID NO: 1855 - protein, 14 aa, Artificial Sequence
  Description of Artificial Sequence: Synthetic peptide
YFCGPEVEEYTLCF

SEQ ID NO: 1856 - protein, 14 aa, Artificial Sequence
  Description of Artificial Sequence: Synthetic peptide
FYCGPEFDESAPCN

SEQ ID NO: 1857 - protein, 14 aa, Artificial Sequence
  Description of Artificial Sequence: Synthetic peptide
FDCGPEVEEYFYCA

SEQ ID NO: 1858 - protein, 14 aa, Artificial Sequence
  Description of Artificial Sequence: Synthetic peptide
DFCWPDWEDFFFCA

SEQ ID NO: 1859 - protein, 14 aa, Artificial Sequence
  Description of Artificial Sequence: Synthetic peptide
FFCGPDGDETLSCN

SEQ ID NO: 1860 - protein, 14 aa, Artificial Sequence
  Description of Artificial Sequence: Synthetic peptide
FICGPEFDESVACL

SEQ ID NO: 1861 - protein, 14 aa, Artificial Sequence
  Description of Artificial Sequence: Synthetic peptide
YDCGPEFDEAIGCY

SEQ ID NO: 1862 - protein, 14 aa, Artificial Sequence
  Description of Artificial Sequence: Synthetic peptide
YICWPDWEEYLYCP

SEQ ID NO: 1863 - protein, 14 aa, Artificial Sequence
  Description of Artificial Sequence: Synthetic peptide
FDCWPDWEEPTTCH

SEQ ID NO: 1864 - protein, 14 aa, Artificial Sequence
  Description of Artificial Sequence: Synthetic peptide
YDCWPDWEDFPICD

SEQ ID NO: 1865 - protein, 14 aa, Artificial Sequence
  Description of Artificial Sequence: Synthetic peptide
VVCWPDWEYIDDCS

SEQ ID NO: 1866 - protein, 14 aa, Artificial Sequence
  Description of Artificial Sequence: Synthetic peptide
INCWPDWEVISFCD

SEQ ID NO: 1867 - protein, 14 aa, Artificial Sequence
  Description of Artificial Sequence: Synthetic peptide
LSCWPDWEEVTPCL

SEQ ID NO: 1868 - protein, 14 aa, Artificial Sequence
  Description of Artificial Sequence: Synthetic peptide
FACWPDWEEVDICY

SEQ ID NO: 1869 - protein, 14 aa, Artificial Sequence
  Description of Artificial Sequence: Synthetic peptide
YDCGPEMDESIVCD

SEQ ID NO: 1870 - protein, 14 aa, Artificial Sequence
  Description of Artificial Sequence: Synthetic peptide
YDCWPDWEVFIVCD

SEQ ID NO: 1871 - protein, 14 aa, Artificial Sequence
  Description of Artificial Sequence: Synthetic peptide
DNCWPDWEHNFFCV

SEQ ID NO: 1872 - protein, 14 aa, Artificial Sequence
  Description of Artificial Sequence: Synthetic peptide
YDCGPDGDESIYCP

SEQ ID NO: 1873 - protein, 14 aa, Artificial Sequence
  Description of Artificial Sequence: Synthetic peptide
YDCGPEFEFPYYCF

SEQ ID NO: 1874 - protein, 14 aa, Artificial Sequence
  Description of Artificial Sequence: Synthetic peptide
ADCGPEYDESVPCV

SEQ ID NO: 1875 - protein, 14 aa, Artificial Sequence
  Description of Artificial Sequence: Synthetic peptide
FLCGPEVEEVHYCS

SEQ ID NO: 1876 - protein, 14 aa, Artificial Sequence
  Description of Artificial Sequence: Synthetic peptide
TDCWPDWEYITSCS

SEQ ID NO: 1877 - protein, 14 aa, Artificial Sequence
  Description of Artificial Sequence: Synthetic peptide
AFCGPELDESITCD

SEQ ID NO: 1878 - protein, 14 aa, Artificial Sequence
  Description of Artificial Sequence: Synthetic peptide
NDCWPDWEEYFSCY

SEQ ID NO: 1879 - protein, 14 aa, Artificial Sequence
  Description of Artificial Sequence: Synthetic peptide
FDCGPEWEIVTDCY

SEQ ID NO: 1880 - protein, 14 aa, Artificial Sequence
  Description of Artificial Sequence: Synthetic peptide
NLCGPEMDESIICP

SEQ ID NO: 1881 - protein, 14 aa, Artificial Sequence
  Description of Artificial Sequence: Synthetic peptide
DLCGPEMDESIYCD

SEQ ID NO: 1882 - protein, 14 aa, Artificial Sequence
  Description of Artificial Sequence: Synthetic peptide
FDCGPDGVEDYICD

SEQ ID NO: 1883 - protein, 14 aa, Artificial Sequence
  Description of Artificial Sequence: Synthetic peptide
YACWPDWEEDFACY

SEQ ID NO: 1884 - protein, 14 aa, Artificial Sequence
  Description of Artificial Sequence: Synthetic peptide
HDCGPEMDESIVCV

SEQ ID NO: 1885 - protein, 14 aa, Artificial Sequence
  Description of Artificial Sequence: Synthetic peptide
VFCGPEFEFIFLCA

SEQ ID NO: 1886 - protein, 14 aa, Artificial Sequence
  Description of Artificial Sequence: Synthetic peptide
YDCGPELDESILCD

SEQ ID NO: 1887 - protein, 14 aa, Artificial Sequence
  Description of Artificial Sequence: Synthetic peptide
SVCWPDWEEFYSCD

SEQ ID NO: 1888 - protein, 14 aa, Artificial Sequence
  Description of Artificial Sequence: Synthetic peptide
PYCGPDGDETAICT

SEQ ID NO: 1889 - protein, 14 aa, Artificial Sequence
  Description of Artificial Sequence: Synthetic peptide
DDCGPELEWYYPCY

SEQ ID NO: 1890 - protein, 14 aa, Artificial Sequence
  Description of Artificial Sequence: Synthetic peptide
FICGPEFDESLPCN

SEQ ID NO: 1891 - protein, 14 aa, Artificial Sequence
  Description of Artificial Sequence: Synthetic peptide
IDCGPEFDESLPCD

SEQ ID NO: 1892 - protein, 14 aa, Artificial Sequence
  Description of Artificial Sequence: Synthetic peptide
FLCGPEFEEDAPCY

SEQ ID NO: 1893 - protein, 14 aa, Artificial Sequence
  Description of Artificial Sequence: Synthetic peptide
IFCGPDGDETHICH

SEQ ID NO: 1894 - protein, 14 aa, Artificial Sequence
  Description of Artificial Sequence: Synthetic peptide
VFCWPDWEYIDFCN

SEQ ID NO: 1895 - protein, 14 aa, Artificial Sequence
  Description of Artificial Sequence: Synthetic peptide
IFCGPEYDESLHCI

SEQ ID NO: 1896 - protein, 14 aa, Artificial Sequence
  Description of Artificial Sequence: Synthetic peptide
HLCWPDWEWYVDCP

SEQ ID NO: 1897 - protein, 14 aa, Artificial Sequence
  Description of Artificial Sequence: Synthetic peptide
FICGPEMDESIACN

SEQ ID NO: 1898 - protein, 14 aa, Artificial Sequence
  Description of Artificial Sequence: Synthetic peptide
IFCGPEVEMIFLCN

SEQ ID NO: 1899 - protein, 14 aa, Artificial Sequence
  Description of Artificial Sequence: Synthetic peptide
YDCGPEWEFPVDCI

SEQ ID NO: 1900 - protein, 14 aa, Artificial Sequence
  Description of Artificial Sequence: Synthetic peptide
NLCGPELDESITCF

SEQ ID NO: 1901 - protein, 14 aa, Artificial Sequence
  Description of Artificial Sequence: Synthetic peptide
FYCGPEVEDFYFCY

SEQ ID NO: 1902 - protein, 14 aa, Artificial Sequence
  Description of Artificial Sequence: Synthetic peptide
DYCGPEFDESLICN

SEQ ID NO: 1903 - protein, 14 aa, Artificial Sequence
  Description of Artificial Sequence: Synthetic peptide
DYCGPEFDESLPCD

SEQ ID NO: 1904 - protein, 14 aa, Artificial Sequence
  Description of Artificial Sequence: Synthetic peptide
AICGPELDESIACP

SEQ ID NO: 1905 - protein, 14 aa, Artificial Sequence
  Description of Artificial Sequence: Synthetic peptide
VICGPEVEDYNLCY

SEQ ID NO: 1906 - protein, 14 aa, Artificial Sequence
  Description of Artificial Sequence: Synthetic peptide
HTCWPDWEDYTVCP

SEQ ID NO: 1907 - protein, 14 aa, Artificial Sequence
  Description of Artificial Sequence: Synthetic peptide
SDCWPDWEYFYDCN

SEQ ID NO: 1908 - protein, 14 aa, Artificial Sequence
  Description of Artificial Sequence: Synthetic peptide
VFCGPDGDETVHCD

SEQ ID NO: 1909 - protein, 14 aa, Artificial Sequence
  Description of Artificial Sequence: Synthetic peptide
DYCGPEYDESVHCI

SEQ ID NO: 1910 - protein, 14 aa, Artificial Sequence
  Description of Artificial Sequence: Synthetic peptide
ADCGPDGDESIICH

SEQ ID NO: 1911 - protein, 14 aa, Artificial Sequence
  Description of Artificial Sequence: Synthetic peptide
FYCGPELDESLTCV

SEQ ID NO: 1912 - protein, 14 aa, Artificial Sequence
  Description of Artificial Sequence: Synthetic peptide
ILCGPEVEEDYYCY

SEQ ID NO: 1913 - protein, 14 aa, Artificial Sequence
  Description of Artificial Sequence: Synthetic peptide
HLCWPDWEEYHSCD

SEQ ID NO: 1914 - protein, 14 aa, Artificial Sequence
  Description of Artificial Sequence: Synthetic peptide
IFCWPDWEDYNFCT

SEQ ID NO: 1915 - protein, 14 aa, Artificial Sequence
  Description of Artificial Sequence: Synthetic peptide
IVCGPDGDETLICH

SEQ ID NO: 1916 - protein, 14 aa, Artificial Sequence
  Description of Artificial Sequence: Synthetic peptide
ADCWPDWEWDYTCD

SEQ ID NO: 1917 - protein, 14 aa, Artificial Sequence
  Description of Artificial Sequence: Synthetic peptide
ITCGPEFDESTTCN

SEQ ID NO: 1918 - protein, 14 aa, Artificial Sequence
  Description of Artificial Sequence: Synthetic peptide
YHCWPDWEEYTSCD

SEQ ID NO: 1919 - protein, 14 aa, Artificial Sequence
  Description of Artificial Sequence: Synthetic peptide
NYCGPEVEEYALCT

SEQ ID NO: 1920 - protein, 14 aa, Artificial Sequence
  Description of Artificial Sequence: Synthetic peptide
FICGPEMDESIHCD

SEQ ID NO: 1921 - protein, 14 aa, Artificial Sequence
  Description of Artificial Sequence: Synthetic peptide
DNCWPDWEEFAVCP

SEQ ID NO: 1922 - protein, 14 aa, Artificial Sequence
  Description of Artificial Sequence: Synthetic peptide
YDCGPELDETVVCD

SEQ ID NO: 1923 - protein, 14 aa, Artificial Sequence
  Description of Artificial Sequence: Synthetic peptide
YDCGPEFDESIACY

SEQ ID NO: 1924 - protein, 14 aa, Artificial Sequence
  Description of Artificial Sequence: Synthetic peptide
IDCWPDWEYTVHCD

SEQ ID NO: 1925 - protein, 14 aa, Artificial Sequence
  Description of Artificial Sequence: Synthetic peptide
DDCGPELDESIICI

SEQ ID NO: 1926 - protein, 14 aa, Artificial Sequence
  Description of Artificial Sequence: Synthetic peptide
VYCGPEYDESSFCF

SEQ ID NO: 1927 - protein, 14 aa, Artificial Sequence
  Description of Artificial Sequence: Synthetic peptide
FNCWPDWEDPYFCV

SEQ ID NO: 1928 - protein, 14 aa, Artificial Sequence
  Description of Artificial Sequence: Synthetic peptide
YDCGPEYDESSYCS

SEQ ID NO: 1929 - protein, 14 aa, Artificial Sequence
  Description of Artificial Sequence: Synthetic peptide
VACWPDWEYTDSCF

SEQ ID NO: 1930 - protein, 14 aa, Artificial Sequence
  Description of Artificial Sequence: Synthetic peptide
TDCGPEFDESVACY

SEQ ID NO: 1931 - protein, 14 aa, Artificial Sequence
  Description of Artificial Sequence: Synthetic peptide
TDCWPDWEFYADCD

SEQ ID NO: 1932 - protein, 14 aa, Artificial Sequence
  Description of Artificial Sequence: Synthetic peptide
YDCGPELDESVICH

SEQ ID NO: 1933 - protein, 14 aa, Artificial Sequence
  Description of Artificial Sequence: Synthetic peptide
SDCGPDGDESIICT

SEQ ID NO: 1934 - protein, 14 aa, Artificial Sequence
  Description of Artificial Sequence: Synthetic peptide
YYCGPEFDESIDCD

SEQ ID NO: 1935 - protein, 14 aa, Artificial Sequence
  Description of Artificial Sequence: Synthetic peptide
FFCGPEIDESIACV

SEQ ID NO: 1936 - protein, 14 aa, Artificial Sequence
  Description of Artificial Sequence: Synthetic peptide
DYCGPEFDESTFCD

SEQ ID NO: 1937 - protein, 14 aa, Artificial Sequence
  Description of Artificial Sequence: Synthetic peptide
YDCGPEWEWPIDCV

SEQ ID NO: 1938 - protein, 14 aa, Artificial Sequence
  Description of Artificial Sequence: Synthetic peptide
FYCGPEIELFSFCY

SEQ ID NO: 1939 - protein, 14 aa, Artificial Sequence
  Description of Artificial Sequence: Synthetic peptide
YYCGPEVDESITCP

SEQ ID NO: 1940 - protein, 14 aa, Artificial Sequence
  Description of Artificial Sequence: Synthetic peptide
ILCGPEFDESINCN

SEQ ID NO: 1941 - protein, 14 aa, Artificial Sequence
  Description of Artificial Sequence: Synthetic peptide
VVCGPAMGQHYLCD

SEQ ID NO: 1942 - protein, 14 aa, Artificial Sequence
  Description of Artificial Sequence: Synthetic peptide
VVCGTKMGEHYLCS

SEQ ID NO: 1943 - protein, 14 aa, Artificial Sequence
  Description of Artificial Sequence: Synthetic peptide
YDCWPDWEYVYACY

SEQ ID NO: 1944 - protein, 14 aa, Artificial Sequence
  Description of Artificial Sequence: Synthetic peptide
DLCGPELDESVNCD

SEQ ID NO: 1945 - protein, 14 aa, Artificial Sequence
  Description of Artificial Sequence: Synthetic peptide
YYCGPEFDESTVCY

SEQ ID NO: 1946 - protein, 14 aa, Artificial Sequence
  Description of Artificial Sequence: Synthetic peptide
LDCWPDWEWPYSCN

SEQ ID NO: 1947 - protein, 14 aa, Artificial Sequence
  Description of Artificial Sequence: Synthetic peptide
FICWPDWEDDFFCY

SEQ ID NO: 1948 - protein, 14 aa, Artificial Sequence
  Description of Artificial Sequence: Synthetic peptide
DLCGPEVEWYFFCN

SEQ ID NO: 1949 - protein, 14 aa, Artificial Sequence
  Description of Artificial Sequence: Synthetic peptide
YDCGPELDESIVCF

SEQ ID NO: 1950 - protein, 14 aa, Artificial Sequence
  Description of Artificial Sequence: Synthetic peptide
LNCWPVWEDDVFCY

SEQ ID NO: 1951 - protein, 14 aa, Artificial Sequence
  Description of Artificial Sequence: Synthetic peptide
FNCWPDWEDPNFCV

SEQ ID NO: 1952 - protein, 14 aa, Artificial Sequence
  Description of Artificial Sequence: Synthetic peptide
VICWPDWEDDYFCP

SEQ ID NO: 1953 - protein, 14 aa, Artificial Sequence
  Description of Artificial Sequence: Synthetic peptide
FLCGPEFDESSVCY

SEQ ID NO: 1954 - protein, 14 aa, Artificial Sequence
  Description of Artificial Sequence: Synthetic peptide
YDCGPELDESIFCY

SEQ ID NO: 1955 - protein, 14 aa, Artificial Sequence
  Description of Artificial Sequence: Synthetic peptide
HLCGPDGDESFTCF

SEQ ID NO: 1956 - protein, 14 aa, Artificial Sequence
  Description of Artificial Sequence: Synthetic peptide
YFCGPEMDESLYCI

SEQ ID NO: 1957 - protein, 14 aa, Artificial Sequence
  Description of Artificial Sequence: Synthetic peptide
YYCGPEVEEYANCY

SEQ ID NO: 1958 - protein, 14 aa, Artificial Sequence
  Description of Artificial Sequence: Synthetic peptide
NTCGPEFDESTACY

SEQ ID NO: 1959 - protein, 14 aa, Artificial Sequence
  Description of Artificial Sequence: Synthetic peptide
IDCWPDWEEAFNCY

SEQ ID NO: 1960 - protein, 14 aa, Artificial Sequence
  Description of Artificial Sequence: Synthetic peptide
AYCGPELEEFFLCT

SEQ ID NO: 1961 - protein, 14 aa, Artificial Sequence
  Description of Artificial Sequence: Synthetic peptide
IYCGPEVEEVHHCY

SEQ ID NO: 1962 - protein, 14 aa, Artificial Sequence
  Description of Artificial Sequence: Synthetic peptide
FFCGPEFDESVACD

SEQ ID NO: 1963 - protein, 14 aa, Artificial Sequence
  Description of Artificial Sequence: Synthetic peptide
YDCGPELDETIICA

SEQ ID NO: 1964 - protein, 14 aa, Artificial Sequence
  Description of Artificial Sequence: Synthetic peptide
ILCGPEWEYPLDCS

SEQ ID NO: 1965 - protein, 14 aa, Artificial Sequence
  Description of Artificial Sequence: Synthetic peptide
FICGPEFDESTTCN

SEQ ID NO: 1966 - protein, 14 aa, Artificial Sequence
  Description of Artificial Sequence: Synthetic peptide
FYCGPELDESVSCD

SEQ ID NO: 1967 - protein, 14 aa, Artificial Sequence
  Description of Artificial Sequence: Synthetic peptide
HLCGPELDESVTCF

SEQ ID NO: 1968 - protein, 14 aa, Artificial Sequence
  Description of Artificial Sequence: Synthetic peptide
LICGPEVEDYSLCH

SEQ ID NO: 1969 - protein, 14 aa, Artificial Sequence
  Description of Artificial Sequence: Synthetic peptide
YFCGPEMDESVYCD

SEQ ID NO: 1970 - protein, 14 aa, Artificial Sequence
  Description of Artificial Sequence: Synthetic peptide
HYCGPEMDESIYCI

SEQ ID NO: 1971 - protein, 14 aa, Artificial Sequence
  Description of Artificial Sequence: Synthetic peptide
FDCGPELDESINCD

SEQ ID NO: 1972 - protein, 14 aa, Artificial Sequence
  Description of Artificial Sequence: Synthetic peptide
YYCGPEVEEYIYCT

SEQ ID NO: 1973 - protein, 14 aa, Artificial Sequence
  Description of Artificial Sequence: Synthetic peptide
LACWPVREEINACI

SEQ ID NO: 1974 - protein, 14 aa, Artificial Sequence
  Description of Artificial Sequence: Synthetic peptide
IDCWPDWEDITFCD

SEQ ID NO: 1975 - protein, 14 aa, Artificial Sequence
  Description of Artificial Sequence: Synthetic peptide
IVCGPELDESITCP

SEQ ID NO: 1976 - protein, 14 aa, Artificial Sequence
  Description of Artificial Sequence: Synthetic peptide
FYCGPEFELPADCD

SEQ ID NO: 1977 - protein, 14 aa, Artificial Sequence
  Description of Artificial Sequence: Synthetic peptide
FDCGPEFDESNPCF

SEQ ID NO: 1978 - protein, 14 aa, Artificial Sequence
  Description of Artificial Sequence: Synthetic peptide
DACWPDWEEYSSCD

SEQ ID NO: 1979 - protein, 14 aa, Artificial Sequence
  Description of Artificial Sequence: Synthetic peptide
DHCWPDWEPNYFCV

SEQ ID NO: 1980 - protein, 14 aa, Artificial Sequence
  Description of Artificial Sequence: Synthetic peptide
DYCWPDWEINYICF

SEQ ID NO: 1981 - protein, 14 aa, Artificial Sequence
  Description of Artificial Sequence: Synthetic peptide
IYCWPDWEYVYACN

SEQ ID NO: 1982 - protein, 14 aa, Artificial Sequence
  Description of Artificial Sequence: Synthetic peptide
DFCGPEVEEDYLCD

SEQ ID NO: 1983 - protein, 14 aa, Artificial Sequence
  Description of Artificial Sequence: Synthetic peptide
HDCGPDGREDYDCA

SEQ ID NO: 1984 - protein, 14 aa, Artificial Sequence
  Description of Artificial Sequence: Synthetic peptide
LACWPDWEDDYFCV

SEQ ID NO: 1985 - protein, 14 aa, Artificial Sequence
  Description of Artificial Sequence: Synthetic peptide
DICWPDWEDYLPCV

SEQ ID NO: 1986 - protein, 14 aa, Artificial Sequence
  Description of Artificial Sequence: Synthetic peptide
ILCGPEIEVYALCP

SEQ ID NO: 1987 - protein, 14 aa, Artificial Sequence
  Description of Artificial Sequence: Synthetic peptide
IFCGPEWEFSVLCN

SEQ ID NO: 1988 - protein, 14 aa, Artificial Sequence
  Description of Artificial Sequence: Synthetic peptide
TYCGPEVEDFSLCV

SEQ ID NO: 1989 - protein, 14 aa, Artificial Sequence
  Description of Artificial Sequence: Synthetic peptide
FICGPEWEFVDACF

SEQ ID NO: 1990 - protein, 14 aa, Artificial Sequence
  Description of Artificial Sequence: Synthetic peptide
FACWPDWEEDSPCD

SEQ ID NO: 1991 - protein, 14 aa, Artificial Sequence
  Description of Artificial Sequence: Synthetic peptide
ILCGPEVEELIFCP

SEQ ID NO: 1992 - protein, 14 aa, Artificial Sequence
  Description of Artificial Sequence: Synthetic peptide
FYCGPEVEEYIYCY

SEQ ID NO: 1993 - protein, 14 aa, Artificial Sequence
  Description of Artificial Sequence: Synthetic peptide
DSCGPELDESIICD

SEQ ID NO: 1994 - protein, 14 aa, Artificial Sequence
  Description of Artificial Sequence: Synthetic peptide
FLCGPDGDETSVCD

SEQ ID NO: 1995 - protein, 14 aa, Artificial Sequence
  Description of Artificial Sequence: Synthetic peptide
FNCWPNGEPTYFCV

SEQ ID NO: 1996 - protein, 14 aa, Artificial Sequence
  Description of Artificial Sequence: Synthetic peptide
LACWPVWEYPVTCI

SEQ ID NO: 1997 - protein, 14 aa, Artificial Sequence
  Description of Artificial Sequence: Synthetic peptide
DYCGPEVEEDVYCY

SEQ ID NO: 1998 - protein, 14 aa, Artificial Sequence
  Description of Artificial Sequence: Synthetic peptide
ITCWPDWEEYANCT

SEQ ID NO: 1999 - protein, 14 aa, Artificial Sequence
  Description of Artificial Sequence: Synthetic peptide
FFCGPDGDETYSCI

SEQ ID NO: 2000 - protein, 14 aa, Artificial Sequence
  Description of Artificial Sequence: Synthetic peptide
TDCWPDWEYATSCD

SEQ ID NO: 2001 - protein, 14 aa, Artificial Sequence
  Description of Artificial Sequence: Synthetic peptide
FNCGPDGYEDYLCD

SEQ ID NO: 2002 - protein, 14 aa, Artificial Sequence
  Description of Artificial Sequence: Synthetic peptide
YDCWPDWEVDFHCP

SEQ ID NO: 2003 - protein, 14 aa, Artificial Sequence
  Description of Artificial Sequence: Synthetic peptide
NICWPDWEDDSFCF

SEQ ID NO: 2004 - protein, 14 aa, Artificial Sequence
  Description of Artificial Sequence: Synthetic peptide
ATCGPEFDESIGCS

SEQ ID NO: 2005 - protein, 14 aa, Artificial Sequence
  Description of Artificial Sequence: Synthetic peptide
SYCGPEFDESTFCD

SEQ ID NO: 2006 - protein, 14 aa, Artificial Sequence
  Description of Artificial Sequence: Synthetic peptide
PICGPEYDESDVCA

SEQ ID NO: 2007 - protein, 14 aa, Artificial Sequence
  Description of Artificial Sequence: Synthetic peptide
YYCGPDGDEYNSCI

SEQ ID NO: 2008 - protein, 14 aa, Artificial Sequence
  Description of Artificial Sequence: Synthetic peptide
VDCWPDWEVFIACD

SEQ ID NO: 2009 - protein, 14 aa, Artificial Sequence
  Description of Artificial Sequence: Synthetic peptide
DLCGPEVEEVNLCL

SEQ ID NO: 2010 - protein, 14 aa, Artificial Sequence
  Description of Artificial Sequence: Synthetic peptide
FDCGPEMDESTTCF

SEQ ID NO: 2011 - protein, 14 aa, Artificial Sequence
  Description of Artificial Sequence: Synthetic peptide
NFCWPDWEPIYFCT

SEQ ID NO: 2012 - protein, 14 aa, Artificial Sequence
  Description of Artificial Sequence: Synthetic peptide
VDCGPDGDESFFCL

SEQ ID NO: 2013 - protein, 14 aa, Artificial Sequence
  Description of Artificial Sequence: Synthetic peptide
VDCGPDGDETAFCI

SEQ ID NO: 2014 - protein, 14 aa, Artificial Sequence
  Description of Artificial Sequence: Synthetic peptide
NICGPEMDESLVCI

SEQ ID NO: 2015 - protein, 14 aa, Artificial Sequence
  Description of Artificial Sequence: Synthetic peptide
IICGPEFDESFFCF

SEQ ID NO: 2016 - protein, 14 aa, Artificial Sequence
  Description of Artificial Sequence: Synthetic peptide
NFCGPEYDESISCI

SEQ ID NO: 2017 - protein, 14 aa, Artificial Sequence
  Description of Artificial Sequence: Synthetic peptide
HLCGPEIEEADICN

SEQ ID NO: 2018 - protein, 14 aa, Artificial Sequence
  Description of Artificial Sequence: Synthetic peptide
DYCGPEVEEDYLCD

SEQ ID NO: 2019 - protein, 14 aa, Artificial Sequence
  Description of Artificial Sequence: Synthetic peptide
DYCGPELDESINCD

SEQ ID NO: 2020 - protein, 14 aa, Artificial Sequence
  Description of Artificial Sequence: Synthetic peptide
FYCGPELDESLFCV

SEQ ID NO: 2021 - protein, 14 aa, Artificial Sequence
  Description of Artificial Sequence: Synthetic peptide
PDCGPEWEFYVTCN

SEQ ID NO: 2022 - protein, 14 aa, Artificial Sequence
  Description of Artificial Sequence: Synthetic peptide
FDCGPEFEYIYACT

SEQ ID NO: 2023 - protein, 14 aa, Artificial Sequence
  Description of Artificial Sequence: Synthetic peptide
DYCGPEFDESSICN

SEQ ID NO: 2024 - protein, 14 aa, Artificial Sequence
  Description of Artificial Sequence: Synthetic peptide
DFCGPEVEEYIFCF

SEQ ID NO: 2025 - protein, 14 aa, Artificial Sequence
  Description of Artificial Sequence: Synthetic peptide
PVCWPDWEYVSSCD

SEQ ID NO: 2026 - protein, 14 aa, Artificial Sequence
  Description of Artificial Sequence: Synthetic peptide
YICGPERDESNLCL

SEQ ID NO: 2027 - protein, 14 aa, Artificial Sequence
  Description of Artificial Sequence: Synthetic peptide
YDCGPELDESIVCD

SEQ ID NO: 2028 - protein, 14 aa, Artificial Sequence
  Description of Artificial Sequence: Synthetic peptide
HDCWPDWEDFYFCV

SEQ ID NO: 2029 - protein, 14 aa, Artificial Sequence
  Description of Artificial Sequence: Synthetic peptide
HYCGPEYDESIDCY

SEQ ID NO: 2030 - protein, 14 aa, Artificial Sequence
  Description of Artificial Sequence: Synthetic peptide
LFCGPEMPEDIFCN

SEQ ID NO: 2031 - protein, 14 aa, Artificial Sequence
  Description of Artificial Sequence: Synthetic peptide
HDCGPELEFHYACY

SEQ ID NO: 2032 - protein, 14 aa, Artificial Sequence
  Description of Artificial Sequence: Synthetic peptide
DFCGPELDESINCF

SEQ ID NO: 2033 - protein, 14 aa, Artificial Sequence
  Description of Artificial Sequence: Synthetic peptide
YFCGPELDESIACN

SEQ ID NO: 2034 - protein, 14 aa, Artificial Sequence
  Description of Artificial Sequence: Synthetic peptide
TDCWPDWEDDIICD

SEQ ID NO: 2035 - protein, 14 aa, Artificial Sequence
  Description of Artificial Sequence: Synthetic peptide
YDCGPELDESIYCF

SEQ ID NO: 2036 - protein, 14 aa, Artificial Sequence
  Description of Artificial Sequence: Synthetic peptide
YYCWPDWWEYVTCD

SEQ ID NO: 2037 - protein, 14 aa, Artificial Sequence
  Description of Artificial Sequence: Synthetic peptide
PICGPELEESYLCN

SEQ ID NO: 2038 - protein, 14 aa, Artificial Sequence
  Description of Artificial Sequence: Synthetic peptide
FDCGPEFDESIVCY

SEQ ID NO: 2039 - protein, 14 aa, Artificial Sequence
  Description of Artificial Sequence: Synthetic peptide
VLCGPDGIEFFDCP

SEQ ID NO: 2040 - protein, 14 aa, Artificial Sequence
  Description of Artificial Sequence: Synthetic peptide
AYCGPEYDESLTCV

SEQ ID NO: 2041 - protein, 14 aa, Artificial Sequence
  Description of Artificial Sequence: Synthetic peptide
DFCGPELDESIICA

SEQ ID NO: 2042 - protein, 14 aa, Artificial Sequence
  Description of Artificial Sequence: Synthetic peptide
YDCGPEFDESLDCN

SEQ ID NO: 2043 - protein, 14 aa, Artificial Sequence
  Description of Artificial Sequence: Synthetic peptide
AICGPEFDESVACD

SEQ ID NO: 2044 - protein, 14 aa, Artificial Sequence
  Description of Artificial Sequence: Synthetic peptide
LLCGPDGVEDFFCD

SEQ ID NO: 2045 - protein, 14 aa, Artificial Sequence
  Description of Artificial Sequence: Synthetic peptide
NFCGPELPEDIFCF

SEQ ID NO: 2046 - protein, 14 aa, Artificial Sequence
  Description of Artificial Sequence: Synthetic peptide
FYCGPEVEEVSLCN

SEQ ID NO: 2047 - protein, 14 aa, Artificial Sequence
  Description of Artificial Sequence: Synthetic peptide
YDCGPDGYEAFYCH

SEQ ID NO: 2048 - protein, 14 aa, Artificial Sequence
  Description of Artificial Sequence: Synthetic peptide
NFCGPEIEFDYLCD

SEQ ID NO: 2049 - protein, 14 aa, Artificial Sequence
  Description of Artificial Sequence: Synthetic peptide
DYCGPDGVEDFICN

SEQ ID NO: 2050 - protein, 14 aa, Artificial Sequence
  Description of Artificial Sequence: Synthetic peptide
TDCWPDWEYIYSCS

SEQ ID NO: 2051 - protein, 14 aa, Artificial Sequence
  Description of Artificial Sequence: Synthetic peptide
FYCGPEFEEITNCI

SEQ ID NO: 2052 - protein, 14 aa, Artificial Sequence
  Description of Artificial Sequence: Synthetic peptide
FDCWPDWEESFFCH

SEQ ID NO: 2053 - protein, 14 aa, Artificial Sequence
  Description of Artificial Sequence: Synthetic peptide
DFCGPDGDESVFCP

SEQ ID NO: 2054 - protein, 14 aa, Artificial Sequence
  Description of Artificial Sequence: Synthetic peptide
HNCGPELDESLVCD

SEQ ID NO: 2055 - protein, 14 aa, Artificial Sequence
  Description of Artificial Sequence: Synthetic peptide
IYCGPDGAEDYTCD

SEQ ID NO: 2056 - protein, 14 aa, Artificial Sequence
  Description of Artificial Sequence: Synthetic peptide
FDCGPEFEFPVICF

SEQ ID NO: 2057 - protein, 14 aa, Artificial Sequence
  Description of Artificial Sequence: Synthetic peptide
YNCGPELDESVTCD

SEQ ID NO: 2058 - protein, 14 aa, Artificial Sequence
  Description of Artificial Sequence: Synthetic peptide
FDCGPELDESIHCA

SEQ ID NO: 2059 - protein, 14 aa, Artificial Sequence
  Description of Artificial Sequence: Synthetic peptide
DICGPEVEEYFLCF

SEQ ID NO: 2060 - protein, 14 aa, Artificial Sequence
  Description of Artificial Sequence: Synthetic peptide
FDCGPEVDESLTCF

SEQ ID NO: 2061 - protein, 14 aa, Artificial Sequence
  Description of Artificial Sequence: Synthetic peptide
FDCGPEIEEFHLCF

SEQ ID NO: 2062 - protein, 14 aa, Artificial Sequence
  Description of Artificial Sequence: Synthetic peptide
AYCGPELDESIICD

SEQ ID NO: 2063 - protein, 14 aa, Artificial Sequence
  Description of Artificial Sequence: Synthetic peptide
YNCGPELDESITCN

SEQ ID NO: 2064 - protein, 14 aa, Artificial Sequence
  Description of Artificial Sequence: Synthetic peptide
FDCWPDWEEPVDCL

SEQ ID NO: 2065 - protein, 14 aa, Artificial Sequence
  Description of Artificial Sequence: Synthetic peptide
DVCGPELDESVLCP

SEQ ID NO: 2066 - protein, 14 aa, Artificial Sequence
  Description of Artificial Sequence: Synthetic peptide
NYCGPELDESLPCP

SEQ ID NO: 2067 - protein, 14 aa, Artificial Sequence
  Description of Artificial Sequence: Synthetic peptide
YYCWPDWEYDIFCS

SEQ ID NO: 2068 - protein, 14 aa, Artificial Sequence
  Description of Artificial Sequence: Synthetic peptide
DDCGPEFDESTYCN

SEQ ID NO: 2069 - protein, 14 aa, Artificial Sequence
  Description of Artificial Sequence: Synthetic peptide
FYCGPEFEEVFHCY

SEQ ID NO: 2070 - protein, 14 aa, Artificial Sequence
  Description of Artificial Sequence: Synthetic peptide
TDCWPDWEEYFLCD

SEQ ID NO: 2071 - protein, 14 aa, Artificial Sequence
  Description of Artificial Sequence: Synthetic peptide
VYCGPEWEESYLCP

SEQ ID NO: 2072 - protein, 14 aa, Artificial Sequence
  Description of Artificial Sequence: Synthetic peptide
DDCGPNGYATFICY

SEQ ID NO: 2073 - protein, 14 aa, Artificial Sequence
  Description of Artificial Sequence: Synthetic peptide
FLCGPEIEDDTHCY

SEQ ID NO: 2074 - protein, 14 aa, Artificial Sequence
  Description of Artificial Sequence: Synthetic peptide
FACWPDWEETIPCH

SEQ ID NO: 2075 - protein, 14 aa, Artificial Sequence
  Description of Artificial Sequence: Synthetic peptide
VLCGPEFDESYNCY

SEQ ID NO: 2076 - protein, 14 aa, Artificial Sequence
  Description of Artificial Sequence: Synthetic peptide
YDCGPEFDESISCI

SEQ ID NO: 2077 - protein, 14 aa, Artificial Sequence
  Description of Artificial Sequence: Synthetic peptide
YDCGPEFDESVNCY

SEQ ID NO: 2078 - protein, 14 aa, Artificial Sequence
  Description of Artificial Sequence: Synthetic peptide
AICWPDWEEFVDCY

SEQ ID NO: 2079 - protein, 14 aa, Artificial Sequence
  Description of Artificial Sequence: Synthetic peptide
LTCWPVREEIFACD

SEQ ID NO: 2080 - protein, 14 aa, Artificial Sequence
  Description of Artificial Sequence: Synthetic peptide
VLCGPEFDESYYCN

SEQ ID NO: 2081 - protein, 14 aa, Artificial Sequence
  Description of Artificial Sequence: Synthetic peptide
NVCGPEYDESAPCN

SEQ ID NO: 2082 - protein, 14 aa, Artificial Sequence
  Description of Artificial Sequence: Synthetic peptide
HDCGPEFDESISCV

SEQ ID NO: 2083 - protein, 14 aa, Artificial Sequence
  Description of Artificial Sequence: Synthetic peptide
FDCGPELDETVDCN

SEQ ID NO: 2084 - protein, 14 aa, Artificial Sequence
  Description of Artificial Sequence: Synthetic peptide
YFCGPEVEEHFYCY

SEQ ID NO: 2085 - protein, 14 aa, Artificial Sequence
  Description of Artificial Sequence: Synthetic peptide
DYCGPELDESIICH

SEQ ID NO: 2086 - protein, 14 aa, Artificial Sequence
  Description of Artificial Sequence: Synthetic peptide
DDCGPEVPEDITCY

SEQ ID NO: 2087 - protein, 14 aa, Artificial Sequence
  Description of Artificial Sequence: Synthetic peptide
DNCGPELDESVVCD

SEQ ID NO: 2088 - protein, 14 aa, Artificial Sequence
  Description of Artificial Sequence: Synthetic peptide
VHCWPDWEPNYVCD

SEQ ID NO: 2089 - protein, 14 aa, Artificial Sequence
  Description of Artificial Sequence: Synthetic peptide
DYCGPELDESLFCL

SEQ ID NO: 2090 - protein, 14 aa, Artificial Sequence
  Description of Artificial Sequence: Synthetic peptide
DDCGPELDESVVCA

SEQ ID NO: 2091 - protein, 14 aa, Artificial Sequence
  Description of Artificial Sequence: Synthetic peptide
AACGPELDESIVCD

SEQ ID NO: 2092 - protein, 14 aa, Artificial Sequence
  Description of Artificial Sequence: Synthetic peptide
DFCGPEFEEINNCF

SEQ ID NO: 2093 - protein, 14 aa, Artificial Sequence
  Description of Artificial Sequence: Synthetic peptide
YYCGPEFDESNACY

SEQ ID NO: 2094 - protein, 14 aa, Artificial Sequence
  Description of Artificial Sequence: Synthetic peptide
VLCGPEFDESNSCY

SEQ ID NO: 2095 - protein, 14 aa, Artificial Sequence
  Description of Artificial Sequence: Synthetic peptide
YDCGPEFDESIDCD

SEQ ID NO: 2096 - protein, 14 aa, Artificial Sequence
  Description of Artificial Sequence: Synthetic peptide
DSCGPEFEFYYVCF

SEQ ID NO: 2097 - protein, 14 aa, Artificial Sequence
  Description of Artificial Sequence: Synthetic peptide
YICGPELDESLICH

SEQ ID NO: 2098 - protein, 14 aa, Artificial Sequence
  Description of Artificial Sequence: Synthetic peptide
FDCGPEVEEDYFCY

SEQ ID NO: 2099 - protein, 14 aa, Artificial Sequence
  Description of Artificial Sequence: Synthetic peptide
FDCGPEYDESLYCF

SEQ ID NO: 2100 - protein, 14 aa, Artificial Sequence
  Description of Artificial Sequence: Synthetic peptide
VLCGPDGDEYSFCH

SEQ ID NO: 2101 - protein, 14 aa, Artificial Sequence
  Description of Artificial Sequence: Synthetic peptide
IPCGPEMDESVVCN

SEQ ID NO: 2102 - protein, 14 aa, Artificial Sequence
  Description of Artificial Sequence: Synthetic peptide
IICGPDGYEDFTCD

SEQ ID NO: 2103 - protein, 14 aa, Artificial Sequence
  Description of Artificial Sequence: Synthetic peptide
IFCGPELDESIICY

SEQ ID NO: 2104 - protein, 14 aa, Artificial Sequence
  Description of Artificial Sequence: Synthetic peptide
VDCGPEFDESYDCY

SEQ ID NO: 2105 - protein, 14 aa, Artificial Sequence
  Description of Artificial Sequence: Synthetic peptide
LSCGPEMDESLYCD

SEQ ID NO: 2106 - protein, 14 aa, Artificial Sequence
  Description of Artificial Sequence: Synthetic peptide
YDCWPDWEYNIDCT

SEQ ID NO: 2107 - protein, 14 aa, Artificial Sequence
  Description of Artificial Sequence: Synthetic peptide
NHCGPDGDETIVCF

SEQ ID NO: 2108 - protein, 14 aa, Artificial Sequence
  Description of Artificial Sequence: Synthetic peptide
NFCGPELDESIPCH

SEQ ID NO: 2109 - protein, 14 aa, Artificial Sequence
  Description of Artificial Sequence: Synthetic peptide
FHCGPEIEEYALCD

SEQ ID NO: 2110 - protein, 14 aa, Artificial Sequence
  Description of Artificial Sequence: Synthetic peptide
VYCGPEVEDYNLCY

SEQ ID NO: 2111 - protein, 14 aa, Artificial Sequence
  Description of Artificial Sequence: Synthetic peptide
VYCGPDGDELANCY

SEQ ID NO: 2112 - protein, 14 aa, Artificial Sequence
  Description of Artificial Sequence: Synthetic peptide
LICGPVIAEDLPCN

SEQ ID NO: 2113 - protein, 14 aa, Artificial Sequence
  Description of Artificial Sequence: Synthetic peptide
DICGPEIPEDVSCD

SEQ ID NO: 2114 - protein, 14 aa, Artificial Sequence
  Description of Artificial Sequence: Synthetic peptide
IYCGPEWEEADYCD

SEQ ID NO: 2115 - protein, 14 aa, Artificial Sequence
  Description of Artificial Sequence: Synthetic peptide
IDCWPDWEDDSICY

SEQ ID NO: 2116 - protein, 14 aa, Artificial Sequence
  Description of Artificial Sequence: Synthetic peptide
VLCGPEVEDFTLCD

SEQ ID NO: 2117 - protein, 14 aa, Artificial Sequence
  Description of Artificial Sequence: Synthetic peptide
LYCGPVIEEIYYCY

SEQ ID NO: 2118 - protein, 14 aa, Artificial Sequence
  Description of Artificial Sequence: Synthetic peptide
FFCGPEFEVHSDCN

SEQ ID NO: 2119 - protein, 14 aa, Artificial Sequence
  Description of Artificial Sequence: Synthetic peptide
NDCGPEVELVSDCN

SEQ ID NO: 2120 - protein, 14 aa, Artificial Sequence
  Description of Artificial Sequence: Synthetic peptide
DLCGPELDESTVCD

SEQ ID NO: 2121 - protein, 14 aa, Artificial Sequence
  Description of Artificial Sequence: Synthetic peptide
IPCGPEVEDYNLCN

SEQ ID NO: 2122 - protein, 14 aa, Artificial Sequence
  Description of Artificial Sequence: Synthetic peptide
YYCGPELEWPVVCN

SEQ ID NO: 2123 - protein, 14 aa, Artificial Sequence
  Description of Artificial Sequence: Synthetic peptide
YDCGPELDESVICN

SEQ ID NO: 2124 - protein, 14 aa, Artificial Sequence
  Description of Artificial Sequence: Synthetic peptide
VYCGPDGDESFDCA

SEQ ID NO: 2125 - protein, 14 aa, Artificial Sequence
  Description of Artificial Sequence: Synthetic peptide
NDCGPEWEDTYFCL

SEQ ID NO: 2126 - protein, 14 aa, Artificial Sequence
  Description of Artificial Sequence: Synthetic peptide
PYCGPEMEELSNCS

SEQ ID NO: 2127 - protein, 14 aa, Artificial Sequence
  Description of Artificial Sequence: Synthetic peptide
DDCGPEFEVISDCY

SEQ ID NO: 2128 - protein, 14 aa, Artificial Sequence
  Description of Artificial Sequence: Synthetic peptide
DLCGPEFPEDVPCD

SEQ ID NO: 2129 - protein, 14 aa, Artificial Sequence
  Description of Artificial Sequence: Synthetic peptide
IYCGPEFDESFVCY

SEQ ID NO: 2130 - protein, 14 aa, Artificial Sequence
  Description of Artificial Sequence: Synthetic peptide
AYCGPEYEVFADCN

SEQ ID NO: 2131 - protein, 14 aa, Artificial Sequence
  Description of Artificial Sequence: Synthetic peptide
IDCGPEYDESVDCL

SEQ ID NO: 2132 - protein, 14 aa, Artificial Sequence
  Description of Artificial Sequence: Synthetic peptide
HICWPDWEEFHDCN

SEQ ID NO: 2133 - protein, 14 aa, Artificial Sequence
  Description of Artificial Sequence: Synthetic peptide
YDCGPELDETITCL

SEQ ID NO: 2134 - protein, 14 aa, Artificial Sequence
  Description of Artificial Sequence: Synthetic peptide
YLCGPELDETILCN

SEQ ID NO: 2135 - protein, 14 aa, Artificial Sequence
  Description of Artificial Sequence: Synthetic peptide
FFCGPEFEEAFLCF

SEQ ID NO: 2136 - protein, 14 aa, Artificial Sequence
  Description of Artificial Sequence: Synthetic peptide
ILCGPELDESFTCA

SEQ ID NO: 2137 - protein, 14 aa, Artificial Sequence
  Description of Artificial Sequence: Synthetic peptide
FHCGPEVELYTDCN

SEQ ID NO: 2138 - protein, 14 aa, Artificial Sequence
  Description of Artificial Sequence: Synthetic peptide
NLCGPEVEEYNFCY

SEQ ID NO: 2139 - protein, 14 aa, Artificial Sequence
  Description of Artificial Sequence: Synthetic peptide
FDCGPEVEETYYCF

SEQ ID NO: 2140 - protein, 14 aa, Artificial Sequence
  Description of Artificial Sequence: Synthetic peptide
VFCGPEFEEDHYCY

SEQ ID NO: 2141 - protein, 14 aa, Artificial Sequence
  Description of Artificial Sequence: Synthetic peptide
AICGPEWEVVADCN

SEQ ID NO: 2142 - protein, 14 aa, Artificial Sequence
  Description of Artificial Sequence: Synthetic peptide
FICWPDWEEDNYCN

SEQ ID NO: 2143 - protein, 14 aa, Artificial Sequence
  Description of Artificial Sequence: Synthetic peptide
IYCGPEFDESFICD

SEQ ID NO: 2144 - protein, 14 aa, Artificial Sequence
  Description of Artificial Sequence: Synthetic peptide
NLCGPEVEDVYDCH

SEQ ID NO: 2145 - protein, 14 aa, Artificial Sequence
  Description of Artificial Sequence: Synthetic peptide
HYCGPEVEEYHNCN

SEQ ID NO: 2146 - protein, 14 aa, Artificial Sequence
  Description of Artificial Sequence: Synthetic peptide
DICGPEYDESYSCT

SEQ ID NO: 2147 - protein, 14 aa, Artificial Sequence
  Description of Artificial Sequence: Synthetic peptide
DYCGPELDETLICA

SEQ ID NO: 2148 - protein, 14 aa, Artificial Sequence
  Description of Artificial Sequence: Synthetic peptide
IACGPEMPEDIDCY

SEQ ID NO: 2149 - protein, 14 aa, Artificial Sequence
  Description of Artificial Sequence: Synthetic peptide
IDCGPELDESIFCD

SEQ ID NO: 2150 - protein, 14 aa, Artificial Sequence
  Description of Artificial Sequence: Synthetic peptide
YFCGPDVEEDFACD

SEQ ID NO: 2151 - protein, 14 aa, Artificial Sequence
  Description of Artificial Sequence: Synthetic peptide
YNCGPEWEYAILCD

SEQ ID NO: 2152 - protein, 14 aa, Artificial Sequence
  Description of Artificial Sequence: Synthetic peptide
IYCGPEVEDYIVCN

SEQ ID NO: 2153 - protein, 14 aa, Artificial Sequence
  Description of Artificial Sequence: Synthetic peptide
YDCGPEIDESTPCA

SEQ ID NO: 2154 - protein, 14 aa, Artificial Sequence
  Description of Artificial Sequence: Synthetic peptide
DTCWPDWEHIYACD

SEQ ID NO: 2155 - protein, 14 aa, Artificial Sequence
  Description of Artificial Sequence: Synthetic peptide
DICGPEMDESVTCN

SEQ ID NO: 2156 - protein, 14 aa, Artificial Sequence
  Description of Artificial Sequence: Synthetic peptide
YDCWPDWERYFPCI

SEQ ID NO: 2157 - protein, 14 aa, Artificial Sequence
  Description of Artificial Sequence: Synthetic peptide
HLCGPELDESVACS

SEQ ID NO: 2158 - protein, 14 aa, Artificial Sequence
  Description of Artificial Sequence: Synthetic peptide
YDCGPDGDETTICA

SEQ ID NO: 2159 - protein, 14 aa, Artificial Sequence
  Description of Artificial Sequence: Synthetic peptide
YYCGPEYEDVLDCF

SEQ ID NO: 2160 - protein, 14 aa, Artificial Sequence
  Description of Artificial Sequence: Synthetic peptide
DFCGPEMDETISCD

SEQ ID NO: 2161 - protein, 14 aa, Artificial Sequence
  Description of Artificial Sequence: Synthetic peptide
ILCGPELDESLVCD

SEQ ID NO: 2162 - protein, 14 aa, Artificial Sequence
  Description of Artificial Sequence: Synthetic peptide
LICGPEWEVITNCD

SEQ ID NO: 2163 - protein, 14 aa, Artificial Sequence
  Description of Artificial Sequence: Synthetic peptide
YDCGPEFDEYFGCP

SEQ ID NO: 2164 - protein, 14 aa, Artificial Sequence
  Description of Artificial Sequence: Synthetic peptide
ALCGPEVEVYDVCV

SEQ ID NO: 2165 - protein, 14 aa, Artificial Sequence
  Description of Artificial Sequence: Synthetic peptide
YHCWPDWEDVNFCY

SEQ ID NO: 2166 - protein, 14 aa, Artificial Sequence
  Description of Artificial Sequence: Synthetic peptide
FLCGPMGGLTFYCY

SEQ ID NO: 2167 - protein, 14 aa, Artificial Sequence
  Description of Artificial Sequence: Synthetic peptide
IICGPEFDEYVGCF

SEQ ID NO: 2168 - protein, 14 aa, Artificial Sequence
  Description of Artificial Sequence: Synthetic peptide
FFCGPEMDESVHCF

SEQ ID NO: 2169 - protein, 14 aa, Artificial Sequence
  Description of Artificial Sequence: Synthetic peptide
AFCGPEFDESLFCA

SEQ ID NO: 2170 - protein, 14 aa, Artificial Sequence
  Description of Artificial Sequence: Synthetic peptide
NYCGPDGDETNICD

SEQ ID NO: 2171 - protein, 14 aa, Artificial Sequence
  Description of Artificial Sequence: Synthetic peptide
YLCGPEWEWVHNCL

SEQ ID NO: 2172 - protein, 14 aa, Artificial Sequence
  Description of Artificial Sequence: Synthetic peptide
ATCGPDGDESHICA

SEQ ID NO: 2173 - protein, 14 aa, Artificial Sequence
  Description of Artificial Sequence: Synthetic peptide
VYCGPEVEVLDYCD

SEQ ID NO: 2174 - protein, 14 aa, Artificial Sequence
  Description of Artificial Sequence: Synthetic peptide
IHCGPEWEFYTDCD

SEQ ID NO: 2175 - protein, 14 aa, Artificial Sequence
  Description of Artificial Sequence: Synthetic peptide
DDCGPELDETVACD

SEQ ID NO: 2176 - protein, 14 aa, Artificial Sequence
  Description of Artificial Sequence: Synthetic peptide
YLCGPEFDESIDCN

SEQ ID NO: 2177 - protein, 14 aa, Artificial Sequence
  Description of Artificial Sequence: Synthetic peptide
LLCGPEVEDVFACY

SEQ ID NO: 2178 - protein, 14 aa, Artificial Sequence
  Description of Artificial Sequence: Synthetic peptide
YDCGPELDESLTCD

SEQ ID NO: 2179 - protein, 14 aa, Artificial Sequence
  Description of Artificial Sequence: Synthetic peptide
FDCGPELDETVNCY

SEQ ID NO: 2180 - protein, 14 aa, Artificial Sequence
  Description of Artificial Sequence: Synthetic peptide
FACWPDWEEINDCH

SEQ ID NO: 2181 - protein, 14 aa, Artificial Sequence
  Description of Artificial Sequence: Synthetic peptide
YYCGPEYEEDIYCN

SEQ ID NO: 2182 - protein, 14 aa, Artificial Sequence
  Description of Artificial Sequence: Synthetic peptide
NVCGPEVEDYTFCY

SEQ ID NO: 2183 - protein, 14 aa, Artificial Sequence
  Description of Artificial Sequence: Synthetic peptide
AYCGPELEEYDFCT

SEQ ID NO: 2184 - protein, 14 aa, Artificial Sequence
  Description of Artificial Sequence: Synthetic peptide
FDCGPEIDESTICT

SEQ ID NO: 2185 - protein, 14 aa, Artificial Sequence
  Description of Artificial Sequence: Synthetic peptide
NLCGPELDETLVCA

SEQ ID NO: 2186 - protein, 14 aa, Artificial Sequence
  Description of Artificial Sequence: Synthetic peptide
YSCWPDWEEYLACN

SEQ ID NO: 2187 - protein, 14 aa, Artificial Sequence
  Description of Artificial Sequence: Synthetic peptide
GICGPEVEDYNYCD

SEQ ID NO: 2188 - protein, 14 aa, Artificial Sequence
  Description of Artificial Sequence: Synthetic peptide
FFCGPELDESVNCH

SEQ ID NO: 2189 - protein, 14 aa, Artificial Sequence
  Description of Artificial Sequence: Synthetic peptide
YYCGPEYEEDFYCF

SEQ ID NO: 2190 - protein, 14 aa, Artificial Sequence
  Description of Artificial Sequence: Synthetic peptide
LYCGPEYDESTDCY

SEQ ID NO: 2191 - protein, 14 aa, Artificial Sequence
  Description of Artificial Sequence: Synthetic peptide
DYCGPEVEEDFLCY

SEQ ID NO: 2192 - protein, 14 aa, Artificial Sequence
  Description of Artificial Sequence: Synthetic peptide
TLCGPEVELYIFCD

SEQ ID NO: 2193 - protein, 14 aa, Artificial Sequence
  Description of Artificial Sequence: Synthetic peptide
FYCGPEFEQIADCY

SEQ ID NO: 2194 - protein, 14 aa, Artificial Sequence
  Description of Artificial Sequence: Synthetic peptide
DDCGPEVEEYHLCD

SEQ ID NO: 2195 - protein, 14 aa, Artificial Sequence
  Description of Artificial Sequence: Synthetic peptide
DYCGPELEDVTLCH

SEQ ID NO: 2196 - protein, 14 aa, Artificial Sequence
  Description of Artificial Sequence: Synthetic peptide
VLCGPEVEDVNLCY

SEQ ID NO: 2197 - protein, 14 aa, Artificial Sequence
  Description of Artificial Sequence: Synthetic peptide
DICGPELDETIDCY

SEQ ID NO: 2198 - protein, 14 aa, Artificial Sequence
  Description of Artificial Sequence: Synthetic peptide
TYCGPEVEEDINCY

SEQ ID NO: 2199 - protein, 14 aa, Artificial Sequence
  Description of Artificial Sequence: Synthetic peptide
IVCWPDWEEYPNCD

SEQ ID NO: 2200 - protein, 14 aa, Artificial Sequence
  Description of Artificial Sequence: Synthetic peptide
SDCGPELDESIICT

SEQ ID NO: 2201 - protein, 14 aa, Artificial Sequence
  Description of Artificial Sequence: Synthetic peptide
YDCGPELPEDYDCN

SEQ ID NO: 2202 - protein, 14 aa, Artificial Sequence
  Description of Artificial Sequence: Synthetic peptide
NLCWPDWEEYYACD

SEQ ID NO: 2203 - protein, 14 aa, Artificial Sequence
  Description of Artificial Sequence: Synthetic peptide
DDCGPELDESLPCH

SEQ ID NO: 2204 - protein, 14 aa, Artificial Sequence
  Description of Artificial Sequence: Synthetic peptide
SLCGPDGQEDYTCF

SEQ ID NO: 2205 - protein, 14 aa, Artificial Sequence
  Description of Artificial Sequence: Synthetic peptide
LICWPDWEEYNFCT

SEQ ID NO: 2206 - protein, 14 aa, Artificial Sequence
  Description of Artificial Sequence: Synthetic peptide
FHCGPDGDETVPCI

SEQ ID NO: 2207 - protein, 14 aa, Artificial Sequence
  Description of Artificial Sequence: Synthetic peptide
FDCGPEWEWIYDCF

SEQ ID NO: 2208 - protein, 14 aa, Artificial Sequence
  Description of Artificial Sequence: Synthetic peptide
IYCGPEWDESLDCD

SEQ ID NO: 2209 - protein, 14 aa, Artificial Sequence
  Description of Artificial Sequence: Synthetic peptide
LICGPEIDESASCN

SEQ ID NO: 2210 - protein, 14 aa, Artificial Sequence
  Description of Artificial Sequence: Synthetic peptide
TSCWVDWEEFSDCI

SEQ ID NO: 2211 - protein, 14 aa, Artificial Sequence
  Description of Artificial Sequence: Synthetic peptide
YYCGPEVEEDYVCD

SEQ ID NO: 2212 - protein, 14 aa, Artificial Sequence
  Description of Artificial Sequence: Synthetic peptide
DDCGPEQEFIYACI

SEQ ID NO: 2213 - protein, 14 aa, Artificial Sequence
  Description of Artificial Sequence: Synthetic peptide
ADCWPDWEEYADCY

SEQ ID NO: 2214 - protein, 14 aa, Artificial Sequence
  Description of Artificial Sequence: Synthetic peptide
YYCGPEFDESIHCI

SEQ ID NO: 2215 - protein, 14 aa, Artificial Sequence
  Description of Artificial Sequence: Synthetic peptide
SECWPDWEPFFDCN

SEQ ID NO: 2216 - protein, 14 aa, Artificial Sequence
  Description of Artificial Sequence: Synthetic peptide
YHCGPEMDESLICT

SEQ ID NO: 2217 - protein, 14 aa, Artificial Sequence
  Description of Artificial Sequence: Synthetic peptide
SDCWPDWEDAYFCI

SEQ ID NO: 2218 - protein, 14 aa, Artificial Sequence
  Description of Artificial Sequence: Synthetic peptide
VDCGPEVEEYYHCD

SEQ ID NO: 2219 - protein, 14 aa, Artificial Sequence
  Description of Artificial Sequence: Synthetic peptide
DNCGPEYDESIACN

SEQ ID NO: 2220 - protein, 14 aa, Artificial Sequence
  Description of Artificial Sequence: Synthetic peptide
LYCGPVFEFYDYCY

SEQ ID NO: 2221 - protein, 14 aa, Artificial Sequence
  Description of Artificial Sequence: Synthetic peptide
YTCGPEMDESVTCI

SEQ ID NO: 2222 - protein, 14 aa, Artificial Sequence
  Description of Artificial Sequence: Synthetic peptide
NFCWPDWEVNSFCD

SEQ ID NO: 2223 - protein, 14 aa, Artificial Sequence
  Description of Artificial Sequence: Synthetic peptide
NACWPDWEYIDFCN

SEQ ID NO: 2224 - protein, 14 aa, Artificial Sequence
  Description of Artificial Sequence: Synthetic peptide
YNCGPEMDESIFCS

SEQ ID NO: 2225 - protein, 14 aa, Artificial Sequence
  Description of Artificial Sequence: Synthetic peptide
LDCGPELDESITCY

SEQ ID NO: 2226 - protein, 14 aa, Artificial Sequence
  Description of Artificial Sequence: Synthetic peptide
HYCGPEFDESINCD

SEQ ID NO: 2227 - protein, 14 aa, Artificial Sequence
  Description of Artificial Sequence: Synthetic peptide
IICGPELPEDYVCT

SEQ ID NO: 2228 - protein, 14 aa, Artificial Sequence
  Description of Artificial Sequence: Synthetic peptide
DICGPEFDESIDCS

SEQ ID NO: 2229 - protein, 14 aa, Artificial Sequence
  Description of Artificial Sequence: Synthetic peptide
PYCGPEFDESVLCF

SEQ ID NO: 2230 - protein, 14 aa, Artificial Sequence
  Description of Artificial Sequence: Synthetic peptide
VFCGPEFDESVDCY

SEQ ID NO: 2231 - protein, 14 aa, Artificial Sequence
  Description of Artificial Sequence: Synthetic peptide
YDCWPDWEEALPCA

SEQ ID NO: 2232 - protein, 14 aa, Artificial Sequence
  Description of Artificial Sequence: Synthetic peptide
DDCWPDWEDYVFCF

SEQ ID NO: 2233 - protein, 14 aa, Artificial Sequence
  Description of Artificial Sequence: Synthetic peptide
HFCGPEWELFSDCY

SEQ ID NO: 2234 - protein, 14 aa, Artificial Sequence
  Description of Artificial Sequence: Synthetic peptide
ITCWPDWEVNFPCY

SEQ ID NO: 2235 - protein, 14 aa, Artificial Sequence
  Description of Artificial Sequence: Synthetic peptide
PDCGPELDESITCN

SEQ ID NO: 2236 - protein, 14 aa, Artificial Sequence
  Description of Artificial Sequence: Synthetic peptide
NLCWPDWEAFFPCY

SEQ ID NO: 2237 - protein, 14 aa, Artificial Sequence
  Description of Artificial Sequence: Synthetic peptide
FYCGPEFEYIRDCY

SEQ ID NO: 2238 - protein, 14 aa, Artificial Sequence
  Description of Artificial Sequence: Synthetic peptide
FFCGPEFDESIICD

SEQ ID NO: 2239 - protein, 14 aa, Artificial Sequence
  Description of Artificial Sequence: Synthetic peptide
VLCGPKGGPTYNCS

SEQ ID NO: 2240 - protein, 14 aa, Artificial Sequence
  Description of Artificial Sequence: Synthetic peptide
LACWPVWEEPGHCD

SEQ ID NO: 2241 - protein, 14 aa, Artificial Sequence
  Description of Artificial Sequence: Synthetic peptide
DYCGPEVEDVNDCY

SEQ ID NO: 2242 - protein, 14 aa, Artificial Sequence
  Description of Artificial Sequence: Synthetic peptide
DYCGPEFEEAHYCN

SEQ ID NO: 2243 - protein, 14 aa, Artificial Sequence
  Description of Artificial Sequence: Synthetic peptide
VLCGPELDETLTCI

SEQ ID NO: 2244 - protein, 14 aa, Artificial Sequence
  Description of Artificial Sequence: Synthetic peptide
YYCGPEIEDYNLCN

SEQ ID NO: 2245 - protein, 14 aa, Artificial Sequence
  Description of Artificial Sequence: Synthetic peptide
YICGPEVEEYYNCF

SEQ ID NO: 2246 - protein, 14 aa, Artificial Sequence
  Description of Artificial Sequence: Synthetic peptide
DICGPELDESIFCF

SEQ ID NO: 2247 - protein, 14 aa, Artificial Sequence
  Description of Artificial Sequence: Synthetic peptide
DICGPEVEEDYLCY

SEQ ID NO: 2248 - protein, 14 aa, Artificial Sequence
  Description of Artificial Sequence: Synthetic peptide
TLCGPEFEEDAPCI

SEQ ID NO: 2249 - protein, 14 aa, Artificial Sequence
  Description of Artificial Sequence: Synthetic peptide
NYCWPDWEYINSCV

SEQ ID NO: 2250 - protein, 14 aa, Artificial Sequence
  Description of Artificial Sequence: Synthetic peptide
NDCGPEVEEYYYCT

SEQ ID NO: 2251 - protein, 14 aa, Artificial Sequence
  Description of Artificial Sequence: Synthetic peptide
ITCGPEMDESIDCN

SEQ ID NO: 2252 - protein, 14 aa, Artificial Sequence
  Description of Artificial Sequence: Synthetic peptide
YYCGPEMAEDLICD

SEQ ID NO: 2253 - protein, 14 aa, Artificial Sequence
  Description of Artificial Sequence: Synthetic peptide
IDCGPELDESIVCT

SEQ ID NO: 2254 - protein, 14 aa, Artificial Sequence
  Description of Artificial Sequence: Synthetic peptide
HTCWPDWEWDVYCD

SEQ ID NO: 2255 - protein, 14 aa, Artificial Sequence
  Description of Artificial Sequence: Synthetic peptide
IHCGPEWELIDDCL

SEQ ID NO: 2256 - protein, 14 aa, Artificial Sequence
  Description of Artificial Sequence: Synthetic peptide
YTCGPELDESITCT

SEQ ID NO: 2257 - protein, 14 aa, Artificial Sequence
  Description of Artificial Sequence: Synthetic peptide
FHCGPEVEETVYCF

SEQ ID NO: 2258 - protein, 14 aa, Artificial Sequence
  Description of Artificial Sequence: Synthetic peptide
DYCGPELDESLICN

SEQ ID NO: 2259 - protein, 14 aa, Artificial Sequence
  Description of Artificial Sequence: Synthetic peptide
IYCGPEFDESDYCI

SEQ ID NO: 2260 - protein, 14 aa, Artificial Sequence
  Description of Artificial Sequence: Synthetic peptide
DLCGPEIEEDLVCT

SEQ ID NO: 2261 - protein, 14 aa, Artificial Sequence
  Description of Artificial Sequence: Synthetic peptide
NICGPELQEDIVCP

SEQ ID NO: 2262 - protein, 14 aa, Artificial Sequence
  Description of Artificial Sequence: Synthetic peptide
NNCGPEMDESITCY

SEQ ID NO: 2263 - protein, 14 aa, Artificial Sequence
  Description of Artificial Sequence: Synthetic peptide
HTCGPELDESIVCV

SEQ ID NO: 2264 - protein, 14 aa, Artificial Sequence
  Description of Artificial Sequence: Synthetic peptide
YYCGPEIEDILVCT

SEQ ID NO: 2265 - protein, 14 aa, Artificial Sequence
  Description of Artificial Sequence: Synthetic peptide
NTCGPEFEFVHLCP

SEQ ID NO: 2266 - protein, 14 aa, Artificial Sequence
  Description of Artificial Sequence: Synthetic peptide
DICGPEMDESTVCD

SEQ ID NO: 2267 - protein, 14 aa, Artificial Sequence
  Description of Artificial Sequence: Synthetic peptide
AICGPEVEIVNYCY

SEQ ID NO: 2268 - protein, 14 aa, Artificial Sequence
  Description of Artificial Sequence: Synthetic peptide
HLCGPEVEDPTACV

SEQ ID NO: 2269 - protein, 14 aa, Artificial Sequence
  Description of Artificial Sequence: Synthetic peptide
ADCGPELDESISCT

SEQ ID NO: 2270 - protein, 14 aa, Artificial Sequence
  Description of Artificial Sequence: Synthetic peptide
FDCGPELDESVICD

SEQ ID NO: 2271 - protein, 14 aa, Artificial Sequence
  Description of Artificial Sequence: Synthetic peptide
DVCGPEFDESIDCN

SEQ ID NO: 2272 - protein, 14 aa, Artificial Sequence
  Description of Artificial Sequence: Synthetic peptide
YLCGPEVEEISICF

SEQ ID NO: 2273 - protein, 14 aa, Artificial Sequence
  Description of Artificial Sequence: Synthetic peptide
SACGPEFDESLHCV

SEQ ID NO: 2274 - protein, 14 aa, Artificial Sequence
  Description of Artificial Sequence: Synthetic peptide
HLCWPDWEEDSACN

SEQ ID NO: 2275 - protein, 14 aa, Artificial Sequence
  Description of Artificial Sequence: Synthetic peptide
HTCWPDWEYDYDCF

SEQ ID NO: 2276 - protein, 14 aa, Artificial Sequence
  Description of Artificial Sequence: Synthetic peptide
YDCGPEWEEVALCN

SEQ ID NO: 2277 - protein, 14 aa, Artificial Sequence
  Description of Artificial Sequence: Synthetic peptide
TLCGPEIEEYIVCY

SEQ ID NO: 2278 - protein, 14 aa, Artificial Sequence
  Description of Artificial Sequence: Synthetic peptide
SYCGPEFDESIFCT

SEQ ID NO: 2279 - protein, 14 aa, Artificial Sequence
  Description of Artificial Sequence: Synthetic peptide
DICGPEFDESLHCY

SEQ ID NO: 2280 - protein, 14 aa, Artificial Sequence
  Description of Artificial Sequence: Synthetic peptide
LFCGPEFEEAYLCI

SEQ ID NO: 2281 - protein, 14 aa, Artificial Sequence
  Description of Artificial Sequence: Synthetic peptide
IFCGPEIEEDFVCT

SEQ ID NO: 2282 - protein, 14 aa, Artificial Sequence
  Description of Artificial Sequence: Synthetic peptide
DDCGPEWEYYVACV

SEQ ID NO: 2283 - protein, 14 aa, Artificial Sequence
  Description of Artificial Sequence: Synthetic peptide
DDCGPELDETTICY

SEQ ID NO: 2284 - protein, 14 aa, Artificial Sequence
  Description of Artificial Sequence: Synthetic peptide
ASCGPELDESIACD

SEQ ID NO: 2285 - protein, 14 aa, Artificial Sequence
  Description of Artificial Sequence: Synthetic peptide
YLCGPEVEDYDYCY

SEQ ID NO: 2286 - protein, 14 aa, Artificial Sequence
  Description of Artificial Sequence: Synthetic peptide
DLCGPEWEETIFCA

SEQ ID NO: 2287 - protein, 14 aa, Artificial Sequence
  Description of Artificial Sequence: Synthetic peptide
DFCGPDGEEFYICP

SEQ ID NO: 2288 - protein, 14 aa, Artificial Sequence
  Description of Artificial Sequence: Synthetic peptide
VYCGPEVEENILCH

SEQ ID NO: 2289 - protein, 14 aa, Artificial Sequence
  Description of Artificial Sequence: Synthetic peptide
DYCGPEVEENYFCF

SEQ ID NO: 2290 - protein, 14 aa, Artificial Sequence
  Description of Artificial Sequence: Synthetic peptide
NDCWPDWYEFLSCD

SEQ ID NO: 2291 - protein, 14 aa, Artificial Sequence
  Description of Artificial Sequence: Synthetic peptide
RDCWPDWEVPYFCD

SEQ ID NO: 2292 - protein, 14 aa, Artificial Sequence
  Description of Artificial Sequence: Synthetic peptide
NLCGPEVEEAVYCY

SEQ ID NO: 2293 - protein, 14 aa, Artificial Sequence
  Description of Artificial Sequence: Synthetic peptide
FDCWPDGELNYLCT

SEQ ID NO: 2294 - protein, 14 aa, Artificial Sequence
  Description of Artificial Sequence: Synthetic peptide
YYCGPEVEDVNLCI

SEQ ID NO: 2295 - protein, 14 aa, Artificial Sequence
  Description of Artificial Sequence: Synthetic peptide
DNCGPEYDESITCL

SEQ ID NO: 2296 - protein, 14 aa, Artificial Sequence
  Description of Artificial Sequence: Synthetic peptide
LNCWPDWEEDYSCN

SEQ ID NO: 2297 - protein, 14 aa, Artificial Sequence
  Description of Artificial Sequence: Synthetic peptide
PTCGPEVEELLSCN

SEQ ID NO: 2298 - protein, 14 aa, Artificial Sequence
  Description of Artificial Sequence: Synthetic peptide
DHCGPEVELIFYCH

SEQ ID NO: 2299 - protein, 14 aa, Artificial Sequence
  Description of Artificial Sequence: Synthetic peptide
FHCGPELDESIFCY

SEQ ID NO: 2300 - protein, 14 aa, Artificial Sequence
  Description of Artificial Sequence: Synthetic peptide
FDCGPELEETVVCP

SEQ ID NO: 2301 - protein, 14 aa, Artificial Sequence
  Description of Artificial Sequence: Synthetic peptide
DFCGPELDESLPCA

SEQ ID NO: 2302 - protein, 14 aa, Artificial Sequence
  Description of Artificial Sequence: Synthetic peptide
DSCGPELDESIYCD

SEQ ID NO: 2303 - protein, 14 aa, Artificial Sequence
  Description of Artificial Sequence: Synthetic peptide
ADCWPDWEEFLLCF

SEQ ID NO: 2304 - protein, 14 aa, Artificial Sequence
  Description of Artificial Sequence: Synthetic peptide
ILCGPEVEELDFCN

SEQ ID NO: 2305 - protein, 14 aa, Artificial Sequence
  Description of Artificial Sequence: Synthetic peptide
FFCGPEFEEIFLCY

SEQ ID NO: 2306 - protein, 14 aa, Artificial Sequence
  Description of Artificial Sequence: Synthetic peptide
YNCGPDGDESYDCH

SEQ ID NO: 2307 - protein, 14 aa, Artificial Sequence
  Description of Artificial Sequence: Synthetic peptide
DNCGPELDETITCF

SEQ ID NO: 2308 - protein, 14 aa, Artificial Sequence
  Description of Artificial Sequence: Synthetic peptide
HNCGPDGDEAFICN

SEQ ID NO: 2309 - protein, 14 aa, Artificial Sequence
  Description of Artificial Sequence: Synthetic peptide
DYCGPEVEEDLVCP

SEQ ID NO: 2310 - protein, 14 aa, Artificial Sequence
  Description of Artificial Sequence: Synthetic peptide
DYCGPELDESLNCF

SEQ ID NO: 2311 - protein, 14 aa, Artificial Sequence
  Description of Artificial Sequence: Synthetic peptide
DYCGPEFQEDFHCH

SEQ ID NO: 2312 - protein, 14 aa, Artificial Sequence
  Description of Artificial Sequence: Synthetic peptide
YDCGPEWEFTDDCI

SEQ ID NO: 2313 - protein, 14 aa, Artificial Sequence
  Description of Artificial Sequence: Synthetic peptide
DICGPEYEEDIICY

SEQ ID NO: 2314 - protein, 14 aa, Artificial Sequence
  Description of Artificial Sequence: Synthetic peptide
FDCGPELDETVPCP

SEQ ID NO: 2315 - protein, 14 aa, Artificial Sequence
  Description of Artificial Sequence: Synthetic peptide
NYCGPELDETSVCD

SEQ ID NO: 2316 - protein, 14 aa, Artificial Sequence
  Description of Artificial Sequence: Synthetic peptide
YYCGPEWEFSFDCD

SEQ ID NO: 2317 - protein, 14 aa, Artificial Sequence
  Description of Artificial Sequence: Synthetic peptide
YACGPELDESVTCD

SEQ ID NO: 2318 - protein, 14 aa, Artificial Sequence
  Description of Artificial Sequence: Synthetic peptide
FLCGPEVEQDYFCV

SEQ ID NO: 2319 - protein, 14 aa, Artificial Sequence
  Description of Artificial Sequence: Synthetic peptide
DNCGPEFDESVRCD

SEQ ID NO: 2320 - protein, 14 aa, Artificial Sequence
  Description of Artificial Sequence: Synthetic peptide
NDCGPDGIETVDCY

SEQ ID NO: 2321 - protein, 14 aa, Artificial Sequence
  Description of Artificial Sequence: Synthetic peptide
YFCGPEVEDYNDCF

SEQ ID NO: 2322 - protein, 14 aa, Artificial Sequence
  Description of Artificial Sequence: Synthetic peptide
NLCGPEFDESIFCY

SEQ ID NO: 2323 - protein, 14 aa, Artificial Sequence
  Description of Artificial Sequence: Synthetic peptide
IDCWPDWEEYIPCT

SEQ ID NO: 2324 - protein, 14 aa, Artificial Sequence
  Description of Artificial Sequence: Synthetic peptide
IYCGPDGDESFICA

SEQ ID NO: 2325 - protein, 14 aa, Artificial Sequence
  Description of Artificial Sequence: Synthetic peptide
DYCGPEFDESVVCY

SEQ ID NO: 2326 - protein, 14 aa, Artificial Sequence
  Description of Artificial Sequence: Synthetic peptide
VFCGPEWEDITDCD

SEQ ID NO: 2327 - protein, 14 aa, Artificial Sequence
  Description of Artificial Sequence: Synthetic peptide
LDCGPEVDETFTCH

SEQ ID NO: 2328 - protein, 14 aa, Artificial Sequence
  Description of Artificial Sequence: Synthetic peptide
DDCGPEYDESFACH

SEQ ID NO: 2329 - protein, 14 aa, Artificial Sequence
  Description of Artificial Sequence: Synthetic peptide
IYCGPEYQEDLPCN

SEQ ID NO: 2330 - protein, 14 aa, Artificial Sequence
  Description of Artificial Sequence: Synthetic peptide
LDCGPEVEEYNYCV

SEQ ID NO: 2331 - protein, 14 aa, Artificial Sequence
  Description of Artificial Sequence: Synthetic peptide
YVCGPEFDESSACN

SEQ ID NO: 2332 - protein, 14 aa, Artificial Sequence
  Description of Artificial Sequence: Synthetic peptide
TPCGPELEEAIGCY

SEQ ID NO: 2333 - protein, 14 aa, Artificial Sequence
  Description of Artificial Sequence: Synthetic peptide
YFCGPEFDESADCN

SEQ ID NO: 2334 - protein, 14 aa, Artificial Sequence
  Description of Artificial Sequence: Synthetic peptide
DDCGPEFEEDIICD

SEQ ID NO: 2335 - protein, 14 aa, Artificial Sequence
  Description of Artificial Sequence: Synthetic peptide
LYCGPVVEELNHCN

SEQ ID NO: 2336 - protein, 14 aa, Artificial Sequence
  Description of Artificial Sequence: Synthetic peptide
VICGPDGEELIACA

SEQ ID NO: 2337 - protein, 14 aa, Artificial Sequence
  Description of Artificial Sequence: Synthetic peptide
FACWPDWQETYVCN

SEQ ID NO: 2338 - protein, 14 aa, Artificial Sequence
  Description of Artificial Sequence: Synthetic peptide
YICGPEVEFLFFCN

SEQ ID NO: 2339 - protein, 14 aa, Artificial Sequence
  Description of Artificial Sequence: Synthetic peptide
TQCGPKGEPTYHCY

SEQ ID NO: 2340 - protein, 14 aa, Artificial Sequence
  Description of Artificial Sequence: Synthetic peptide
NYCGPEVEEYHNCD

SEQ ID NO: 2341 - protein, 14 aa, Artificial Sequence
  Description of Artificial Sequence: Synthetic peptide
VYCGPEWEFFSDCA

SEQ ID NO: 2342 - protein, 14 aa, Artificial Sequence
  Description of Artificial Sequence: Synthetic peptide
FYCGPELEESFFCY

SEQ ID NO: 2343 - protein, 14 aa, Artificial Sequence
  Description of Artificial Sequence: Synthetic peptide
DYCGPEIEENFYCY

SEQ ID NO: 2344 - protein, 14 aa, Artificial Sequence
  Description of Artificial Sequence: Synthetic peptide
YACGPEVEEYVYCA

SEQ ID NO: 2345 - protein, 14 aa, Artificial Sequence
  Description of Artificial Sequence: Synthetic peptide
VDCGPELDESIICD

SEQ ID NO: 2346 - protein, 14 aa, Artificial Sequence
  Description of Artificial Sequence: Synthetic peptide
NDCGPEMDESIACY

SEQ ID NO: 2347 - protein, 14 aa, Artificial Sequence
  Description of Artificial Sequence: Synthetic peptide
VYCGPEFDEYLACA

SEQ ID NO: 2348 - protein, 14 aa, Artificial Sequence
  Description of Artificial Sequence: Synthetic peptide
VICGPEFDESANCD

SEQ ID NO: 2349 - protein, 14 aa, Artificial Sequence
  Description of Artificial Sequence: Synthetic peptide
LTCWPDWEEDFFCN

SEQ ID NO: 2350 - protein, 14 aa, Artificial Sequence
  Description of Artificial Sequence: Synthetic peptide
FYCGPEQEEINYCY

SEQ ID NO: 2351 - protein, 14 aa, Artificial Sequence
  Description of Artificial Sequence: Synthetic peptide
TYCGPELEEFFLCY

SEQ ID NO: 2352 - protein, 14 aa, Artificial Sequence
  Description of Artificial Sequence: Synthetic peptide
PDCGPELDESVACH

SEQ ID NO: 2353 - protein, 14 aa, Artificial Sequence
  Description of Artificial Sequence: Synthetic peptide
NDCGPEFEEIIFCV

SEQ ID NO: 2354 - protein, 14 aa, Artificial Sequence
  Description of Artificial Sequence: Synthetic peptide
YICGPEFDESFYCN

SEQ ID NO: 2355 - protein, 14 aa, Artificial Sequence
  Description of Artificial Sequence: Synthetic peptide
HACGPELDESLLCN

SEQ ID NO: 2356 - protein, 14 aa, Artificial Sequence
  Description of Artificial Sequence: Synthetic peptide
YYCGPEWEEAVLCA

SEQ ID NO: 2357 - protein, 14 aa, Artificial Sequence
  Description of Artificial Sequence: Synthetic peptide
AFCGPEVEEYDLCN

SEQ ID NO: 2358 - protein, 14 aa, Artificial Sequence
  Description of Artificial Sequence: Synthetic peptide
YNCGPEFDESVACS

SEQ ID NO: 2359 - protein, 14 aa, Artificial Sequence
  Description of Artificial Sequence: Synthetic peptide
YLCGPEVEDDTLCA

SEQ ID NO: 2360 - protein, 14 aa, Artificial Sequence
  Description of Artificial Sequence: Synthetic peptide
AVCGPEFDESVNCD

SEQ ID NO: 2361 - protein, 14 aa, Artificial Sequence
  Description of Artificial Sequence: Synthetic peptide
NYCGPEWEVYSLCP

SEQ ID NO: 2362 - protein, 14 aa, Artificial Sequence
  Description of Artificial Sequence: Synthetic peptide
DFCGPEVEEDTYCH

SEQ ID NO: 2363 - protein, 14 aa, Artificial Sequence
  Description of Artificial Sequence: Synthetic peptide
ISCGPEYEWDYACN

SEQ ID NO: 2364 - protein, 14 aa, Artificial Sequence
  Description of Artificial Sequence: Synthetic peptide
VNCGPELDESIICY

SEQ ID NO: 2365 - protein, 14 aa, Artificial Sequence
  Description of Artificial Sequence: Synthetic peptide
YDCGPEFDETAPCY

SEQ ID NO: 2366 - protein, 14 aa, Artificial Sequence
  Description of Artificial Sequence: Synthetic peptide
YLCGPEFEENFLCT

SEQ ID NO: 2367 - protein, 14 aa, Artificial Sequence
  Description of Artificial Sequence: Synthetic peptide
FDCGPEVDESVDCA

SEQ ID NO: 2368 - protein, 14 aa, Artificial Sequence
  Description of Artificial Sequence: Synthetic peptide
YDCGPEQEEISFCN

SEQ ID NO: 2369 - protein, 14 aa, Artificial Sequence
  Description of Artificial Sequence: Synthetic peptide
IDCGPEIELYDDCF

SEQ ID NO: 2370 - protein, 14 aa, Artificial Sequence
  Description of Artificial Sequence: Synthetic peptide
TFCGPELDESVYCY

SEQ ID NO: 2371 - protein, 14 aa, Artificial Sequence
  Description of Artificial Sequence: Synthetic peptide
FFCGPEIDESNACV

SEQ ID NO: 2372 - protein, 14 aa, Artificial Sequence
  Description of Artificial Sequence: Synthetic peptide
YHCWPDWEPIYICI

SEQ ID NO: 2373 - protein, 14 aa, Artificial Sequence
  Description of Artificial Sequence: Synthetic peptide
AICGPEYEEDHYCY

SEQ ID NO: 2374 - protein, 14 aa, Artificial Sequence
  Description of Artificial Sequence: Synthetic peptide
PLCGPDGFENYNCF

SEQ ID NO: 2375 - protein, 14 aa, Artificial Sequence
  Description of Artificial Sequence: Synthetic peptide
FPCWPDWEWDNNCH

SEQ ID NO: 2376 - protein, 14 aa, Artificial Sequence
  Description of Artificial Sequence: Synthetic peptide
VDCGPDGDELAACH

SEQ ID NO: 2377 - protein, 14 aa, Artificial Sequence
  Description of Artificial Sequence: Synthetic peptide
VDCWPDWEEYYSCD

SEQ ID NO: 2378 - protein, 14 aa, Artificial Sequence
  Description of Artificial Sequence: Synthetic peptide
VYCGPEYDESYDCT

SEQ ID NO: 2379 - protein, 14 aa, Artificial Sequence
  Description of Artificial Sequence: Synthetic peptide
NLCGPEWENFADCF

SEQ ID NO: 2380 - protein, 14 aa, Artificial Sequence
  Description of Artificial Sequence: Synthetic peptide
YLCGPELEVFFVCD

SEQ ID NO: 2381 - protein, 14 aa, Artificial Sequence
  Description of Artificial Sequence: Synthetic peptide
IFCGPELEDYSICF

SEQ ID NO: 2382 - protein, 14 aa, Artificial Sequence
  Description of Artificial Sequence: Synthetic peptide
DYCGPELEQYDLCF

SEQ ID NO: 2383 - protein, 14 aa, Artificial Sequence
  Description of Artificial Sequence: Synthetic peptide
LLCGPVNEDPLDCY

SEQ ID NO: 2384 - protein, 14 aa, Artificial Sequence
  Description of Artificial Sequence: Synthetic peptide
IDCGPEFDESVFCY

SEQ ID NO: 2385 - protein, 14 aa, Artificial Sequence
  Description of Artificial Sequence: Synthetic peptide
IICGPEVEEIDICS

SEQ ID NO: 2386 - protein, 14 aa, Artificial Sequence
  Description of Artificial Sequence: Synthetic peptide
IACWPDWEDYSSCP

SEQ ID NO: 2387 - protein, 14 aa, Artificial Sequence
  Description of Artificial Sequence: Synthetic peptide
YYCGPEVEDINDCI

SEQ ID NO: 2388 - protein, 14 aa, Artificial Sequence
  Description of Artificial Sequence: Synthetic peptide
NICGPEMDESIDCI

SEQ ID NO: 2389 - protein, 14 aa, Artificial Sequence
  Description of Artificial Sequence: Synthetic peptide
FDCWPDWEELVSCY

SEQ ID NO: 2390 - protein, 14 aa, Artificial Sequence
  Description of Artificial Sequence: Synthetic peptide
YFCGPEWEDHFFCD

SEQ ID NO: 2391 - protein, 14 aa, Artificial Sequence
  Description of Artificial Sequence: Synthetic peptide
TYCGPEFEEDSYCD

SEQ ID NO: 2392 - protein, 14 aa, Artificial Sequence
  Description of Artificial Sequence: Synthetic peptide
NLCGPEVELIDICS

SEQ ID NO: 2393 - protein, 14 aa, Artificial Sequence
  Description of Artificial Sequence: Synthetic peptide
DNCGPEWEEVYLCN

SEQ ID NO: 2394 - protein, 14 aa, Artificial Sequence
  Description of Artificial Sequence: Synthetic peptide
FLCGPEFDESDLCF

SEQ ID NO: 2395 - protein, 14 aa, Artificial Sequence
  Description of Artificial Sequence: Synthetic peptide
HICGPEQDESIGCT

SEQ ID NO: 2396 - protein, 14 aa, Artificial Sequence
  Description of Artificial Sequence: Synthetic peptide
FDCWPDWEDNSYCD

SEQ ID NO: 2397 - protein, 14 aa, Artificial Sequence
  Description of Artificial Sequence: Synthetic peptide
TACGPEWEFDFNCD

SEQ ID NO: 2398 - protein, 14 aa, Artificial Sequence
  Description of Artificial Sequence: Synthetic peptide
HHCWPDWEDYSTCP

SEQ ID NO: 2399 - protein, 14 aa, Artificial Sequence
  Description of Artificial Sequence: Synthetic peptide
YYCGPEFDESVNCF

SEQ ID NO: 2400 - protein, 14 aa, Artificial Sequence
  Description of Artificial Sequence: Synthetic peptide
LHCWPDWEEIDICD

SEQ ID NO: 2401 - protein, 14 aa, Artificial Sequence
  Description of Artificial Sequence: Synthetic peptide
DICGPDGQEDFVCS

SEQ ID NO: 2402 - protein, 14 aa, Artificial Sequence
  Description of Artificial Sequence: Synthetic peptide
DVCWPDWEVNYFCD

SEQ ID NO: 2403 - protein, 14 aa, Artificial Sequence
  Description of Artificial Sequence: Synthetic peptide
VNCGPEMDESIDCA

SEQ ID NO: 2404 - protein, 14 aa, Artificial Sequence
  Description of Artificial Sequence: Synthetic peptide
DNCGPEFDEATVCN

SEQ ID NO: 2405 - protein, 14 aa, Artificial Sequence
  Description of Artificial Sequence: Synthetic peptide
DLCGPEFEEVHNCN

SEQ ID NO: 2406 - protein, 14 aa, Artificial Sequence
  Description of Artificial Sequence: Synthetic peptide
VNCGPEFDESSYCF

SEQ ID NO: 2407 - protein, 14 aa, Artificial Sequence
  Description of Artificial Sequence: Synthetic peptide
NICWPDWEEDNFCS

SEQ ID NO: 2408 - protein, 14 aa, Artificial Sequence
  Description of Artificial Sequence: Synthetic peptide
FVCGPEWEVYDDCD

SEQ ID NO: 2409 - protein, 14 aa, Artificial Sequence
  Description of Artificial Sequence: Synthetic peptide
AYCGPELEVVHLCV

SEQ ID NO: 2410 - protein, 14 aa, Artificial Sequence
  Description of Artificial Sequence: Synthetic peptide
PFCGPEMDETIDCY

SEQ ID NO: 2411 - protein, 14 aa, Artificial Sequence
  Description of Artificial Sequence: Synthetic peptide
LLCGPVMEDVFACY

SEQ ID NO: 2412 - protein, 14 aa, Artificial Sequence
  Description of Artificial Sequence: Synthetic peptide
DLCGPEFDESTNCY

SEQ ID NO: 2413 - protein, 14 aa, Artificial Sequence
  Description of Artificial Sequence: Synthetic peptide
HDCGPEMEEYYLCP

SEQ ID NO: 2414 - protein, 14 aa, Artificial Sequence
  Description of Artificial Sequence: Synthetic peptide
TDCGPEYDESIICP

SEQ ID NO: 2415 - protein, 14 aa, Artificial Sequence
  Description of Artificial Sequence: Synthetic peptide
VLCWPDWEDYADCN

SEQ ID NO: 2416 - protein, 14 aa, Artificial Sequence
  Description of Artificial Sequence: Synthetic peptide
NDCGPELDESLTCD

SEQ ID NO: 2417 - protein, 14 aa, Artificial Sequence
  Description of Artificial Sequence: Synthetic peptide
IYCGPELDESIACY

SEQ ID NO: 2418 - protein, 14 aa, Artificial Sequence
  Description of Artificial Sequence: Synthetic peptide
NYCGPEVEEFNFCH

SEQ ID NO: 2419 - protein, 14 aa, Artificial Sequence
  Description of Artificial Sequence: Synthetic peptide
DVCGPEIEEYSFCI

SEQ ID NO: 2420 - protein, 14 aa, Artificial Sequence
  Description of Artificial Sequence: Synthetic peptide
DLCGPEVEEITDCA

SEQ ID NO: 2421 - protein, 14 aa, Artificial Sequence
  Description of Artificial Sequence: Synthetic peptide
HDCGPEFDESVFCI

SEQ ID NO: 2422 - protein, 14 aa, Artificial Sequence
  Description of Artificial Sequence: Synthetic peptide
PLCGPVLEEDIYCY

SEQ ID NO: 2423 - protein, 14 aa, Artificial Sequence
  Description of Artificial Sequence: Synthetic peptide
DLCGPEFEDIIDCN

SEQ ID NO: 2424 - protein, 14 aa, Artificial Sequence
  Description of Artificial Sequence: Synthetic peptide
DYCGPEVEVPSNCN

SEQ ID NO: 2425 - protein, 14 aa, Artificial Sequence
  Description of Artificial Sequence: Synthetic peptide
IICGPELDESTACD

SEQ ID NO: 2426 - protein, 14 aa, Artificial Sequence
  Description of Artificial Sequence: Synthetic peptide
DHCGPEFDESVNCD

SEQ ID NO: 2427 - protein, 14 aa, Artificial Sequence
  Description of Artificial Sequence: Synthetic peptide
FDCGPEFDESLYCS

SEQ ID NO: 2428 - protein, 14 aa, Artificial Sequence
  Description of Artificial Sequence: Synthetic peptide
FACWPDWEEVYICY

SEQ ID NO: 2429 - protein, 14 aa, Artificial Sequence
  Description of Artificial Sequence: Synthetic peptide
LYCGPEFDESLDCS

SEQ ID NO: 2430 - protein, 14 aa, Artificial Sequence
  Description of Artificial Sequence: Synthetic peptide
DLCGPELEEAFLCA

SEQ ID NO: 2431 - protein, 14 aa, Artificial Sequence
  Description of Artificial Sequence: Synthetic peptide
FACGPELDETLTCL

SEQ ID NO: 2432 - protein, 14 aa, Artificial Sequence
  Description of Artificial Sequence: Synthetic peptide
FDCGPEVEEISNCD

SEQ ID NO: 2433 - protein, 14 aa, Artificial Sequence
  Description of Artificial Sequence: Synthetic peptide
VHCGPELEYPFDCN

SEQ ID NO: 2434 - protein, 14 aa, Artificial Sequence
  Description of Artificial Sequence: Synthetic peptide
AYCGPEFEEHTTCN

SEQ ID NO: 2435 - protein, 14 aa, Artificial Sequence
  Description of Artificial Sequence: Synthetic peptide
LYCGPVSEQFTFCI

SEQ ID NO: 2436 - protein, 14 aa, Artificial Sequence
  Description of Artificial Sequence: Synthetic peptide
DYCGPELDESYDCN

SEQ ID NO: 2437 - protein, 14 aa, Artificial Sequence
  Description of Artificial Sequence: Synthetic peptide
FYCGPEWEEFDVCI

SEQ ID NO: 2438 - protein, 14 aa, Artificial Sequence
  Description of Artificial Sequence: Synthetic peptide
FTCGPEVEEYDHCI

SEQ ID NO: 2439 - protein, 14 aa, Artificial Sequence
  Description of Artificial Sequence: Synthetic peptide
YNCGPEFDESVTCF

SEQ ID NO: 2440 - protein, 14 aa, Artificial Sequence
  Description of Artificial Sequence: Synthetic peptide
AVCGPENDESNSCA

SEQ ID NO: 2441 - protein, 14 aa, Artificial Sequence
  Description of Artificial Sequence: Synthetic peptide
IYCWPDWEVPNDCA

SEQ ID NO: 2442 - protein, 14 aa, Artificial Sequence
  Description of Artificial Sequence: Synthetic peptide
YFCGPEFEEFFHCY

SEQ ID NO: 2443 - protein, 14 aa, Artificial Sequence
  Description of Artificial Sequence: Synthetic peptide
YVCGPDGDESSFCD

SEQ ID NO: 2444 - protein, 14 aa, Artificial Sequence
  Description of Artificial Sequence: Synthetic peptide
ISCGPEVEEFFYCY

SEQ ID NO: 2445 - protein, 14 aa, Artificial Sequence
  Description of Artificial Sequence: Synthetic peptide
LICGPVFEEDVYCD

SEQ ID NO: 2446 - protein, 14 aa, Artificial Sequence
  Description of Artificial Sequence: Synthetic peptide
VYCGPEVEDHNYCA

SEQ ID NO: 2447 - protein, 14 aa, Artificial Sequence
  Description of Artificial Sequence: Synthetic peptide
LDCGPEFEFVYICA

SEQ ID NO: 2448 - protein, 14 aa, Artificial Sequence
  Description of Artificial Sequence: Synthetic peptide
YDCGPEFEEDLPCI

SEQ ID NO: 2449 - protein, 14 aa, Artificial Sequence
  Description of Artificial Sequence: Synthetic peptide
DVCGPEVEEDYYCD

SEQ ID NO: 2450 - protein, 14 aa, Artificial Sequence
  Description of Artificial Sequence: Synthetic peptide
NDCWPDWEYDNVCV

SEQ ID NO: 2451 - protein, 14 aa, Artificial Sequence
  Description of Artificial Sequence: Synthetic peptide
DLCGPEFEVANDCN

SEQ ID NO: 2452 - protein, 14 aa, Artificial Sequence
  Description of Artificial Sequence: Synthetic peptide
HDCGPELDESISCN

SEQ ID NO: 2453 - protein, 14 aa, Artificial Sequence
  Description of Artificial Sequence: Synthetic peptide
LDCWPDWEETTHCD

SEQ ID NO: 2454 - protein, 14 aa, Artificial Sequence
  Description of Artificial Sequence: Synthetic peptide
IICGPEVEEDDYCL

SEQ ID NO: 2455 - protein, 14 aa, Artificial Sequence
  Description of Artificial Sequence: Synthetic peptide
YYCWPDWEEVIICD

SEQ ID NO: 2456 - protein, 14 aa, Artificial Sequence
  Description of Artificial Sequence: Synthetic peptide
FDCGPEIDEYTNCN

SEQ ID NO: 2457 - protein, 14 aa, Artificial Sequence
  Description of Artificial Sequence: Synthetic peptide
ITCGPELDETINCD

SEQ ID NO: 2458 - protein, 14 aa, Artificial Sequence
  Description of Artificial Sequence: Synthetic peptide
DSCGPEVEEDIYCI

SEQ ID NO: 2459 - protein, 14 aa, Artificial Sequence
  Description of Artificial Sequence: Synthetic peptide
YLCGPEFDESGNCH

SEQ ID NO: 2460 - protein, 14 aa, Artificial Sequence
  Description of Artificial Sequence: Synthetic peptide
DNCGPELPEDYFCD

SEQ ID NO: 2461 - protein, 14 aa, Artificial Sequence
  Description of Artificial Sequence: Synthetic peptide
VLCGPEFEEVSNCN

SEQ ID NO: 2462 - protein, 14 aa, Artificial Sequence
  Description of Artificial Sequence: Synthetic peptide
VDCWPDWEEDIVCD

SEQ ID NO: 2463 - protein, 14 aa, Artificial Sequence
  Description of Artificial Sequence: Synthetic peptide
VYCWPDWEDNFPCY

SEQ ID NO: 2464 - protein, 14 aa, Artificial Sequence
  Description of Artificial Sequence: Synthetic peptide
DYCGPEVEEHFNCH

SEQ ID NO: 2465 - protein, 14 aa, Artificial Sequence
  Description of Artificial Sequence: Synthetic peptide
ADCGPEIEEDAYCY

SEQ ID NO: 2466 - protein, 14 aa, Artificial Sequence
  Description of Artificial Sequence: Synthetic peptide
ILCWPDWEDATFCY

SEQ ID NO: 2467 - protein, 14 aa, Artificial Sequence
  Description of Artificial Sequence: Synthetic peptide
IHCWPDWEDFNICP

SEQ ID NO: 2468 - protein, 14 aa, Artificial Sequence
  Description of Artificial Sequence: Synthetic peptide
TICGPEVEDYNDCI

SEQ ID NO: 2469 - protein, 14 aa, Artificial Sequence
  Description of Artificial Sequence: Synthetic peptide
DDCGPELDESVACI

SEQ ID NO: 2470 - protein, 14 aa, Artificial Sequence
  Description of Artificial Sequence: Synthetic peptide
DDCWPDWEDHIFCF

SEQ ID NO: 2471 - protein, 14 aa, Artificial Sequence
  Description of Artificial Sequence: Synthetic peptide
VNCGPEVEEIIFCD

SEQ ID NO: 2472 - protein, 14 aa, Artificial Sequence
  Description of Artificial Sequence: Synthetic peptide
IFCWPDWEDDTVCI

SEQ ID NO: 2473 - protein, 14 aa, Artificial Sequence
  Description of Artificial Sequence: Synthetic peptide
IICGPEFEEISDCL

SEQ ID NO: 2474 - protein, 14 aa, Artificial Sequence
  Description of Artificial Sequence: Synthetic peptide
FDCGPEVEEYNDCD

SEQ ID NO: 2475 - protein, 14 aa, Artificial Sequence
  Description of Artificial Sequence: Synthetic peptide
NDCGPELDETLYCI

SEQ ID NO: 2476 - protein, 14 aa, Artificial Sequence
  Description of Artificial Sequence: Synthetic peptide
AICGPELEEDISCN

SEQ ID NO: 2477 - protein, 14 aa, Artificial Sequence
  Description of Artificial Sequence: Synthetic peptide
HLCGPEFDESTNCY

SEQ ID NO: 2478 - protein, 14 aa, Artificial Sequence
  Description of Artificial Sequence: Synthetic peptide
SYCGPELDESVACI

SEQ ID NO: 2479 - protein, 14 aa, Artificial Sequence
  Description of Artificial Sequence: Synthetic peptide
LYCGPEFEQLADCT

SEQ ID NO: 2480 - protein, 14 aa, Artificial Sequence
  Description of Artificial Sequence: Synthetic peptide
IDCGPELDESIACN

SEQ ID NO: 2481 - protein, 14 aa, Artificial Sequence
  Description of Artificial Sequence: Synthetic peptide
FDCGPDGQEDLVCN

SEQ ID NO: 2482 - protein, 14 aa, Artificial Sequence
  Description of Artificial Sequence: Synthetic peptide
NLCGPEFEEFFDCY

SEQ ID NO: 2483 - protein, 14 aa, Artificial Sequence
  Description of Artificial Sequence: Synthetic peptide
SICGPELQEDIVCP

SEQ ID NO: 2484 - protein, 14 aa, Artificial Sequence
  Description of Artificial Sequence: Synthetic peptide
NPCGPEYDESAHCD

SEQ ID NO: 2485 - protein, 14 aa, Artificial Sequence
  Description of Artificial Sequence: Synthetic peptide
YDCGPELDEYYNCN

SEQ ID NO: 2486 - protein, 14 aa, Artificial Sequence
  Description of Artificial Sequence: Synthetic peptide
VDCGPELDETIFCD

SEQ ID NO: 2487 - protein, 14 aa, Artificial Sequence
  Description of Artificial Sequence: Synthetic peptide
DNCGPELDESVTCT

SEQ ID NO: 2488 - protein, 14 aa, Artificial Sequence
  Description of Artificial Sequence: Synthetic peptide
VDCGPELDESSYCD

SEQ ID NO: 2489 - protein, 14 aa, Artificial Sequence
  Description of Artificial Sequence: Synthetic peptide
YYCGPEFEFIDFCF

SEQ ID NO: 2490 - protein, 14 aa, Artificial Sequence
  Description of Artificial Sequence: Synthetic peptide
YDCWPDWEVITYCN

SEQ ID NO: 2491 - protein, 14 aa, Artificial Sequence
  Description of Artificial Sequence: Synthetic peptide
FDCGPEIEEDFFCV

SEQ ID NO: 2492 - protein, 14 aa, Artificial Sequence
  Description of Artificial Sequence: Synthetic peptide
IFCWPDWDDINFCD

SEQ ID NO: 2493 - protein, 14 aa, Artificial Sequence
  Description of Artificial Sequence: Synthetic peptide
NFCGPELPEDITCY

SEQ ID NO: 2494 - protein, 14 aa, Artificial Sequence
  Description of Artificial Sequence: Synthetic peptide
SLCGPEFEEYYHCL

SEQ ID NO: 2495 - protein, 14 aa, Artificial Sequence
  Description of Artificial Sequence: Synthetic peptide
ASCGPELDESLDCL

SEQ ID NO: 2496 - protein, 14 aa, Artificial Sequence
  Description of Artificial Sequence: Synthetic peptide
SFCGPEREWDLACY

SEQ ID NO: 2497 - protein, 14 aa, Artificial Sequence
  Description of Artificial Sequence: Synthetic peptide
HLCGPEFEDVLDCI

SEQ ID NO: 2498 - protein, 14 aa, Artificial Sequence
  Description of Artificial Sequence: Synthetic peptide
LDCGPDGDEFYYCL

SEQ ID NO: 2499 - protein, 14 aa, Artificial Sequence
  Description of Artificial Sequence: Synthetic peptide
DNCWPDWEEDIACT

SEQ ID NO: 2500 - protein, 14 aa, Artificial Sequence
  Description of Artificial Sequence: Synthetic peptide
SDCGPELDETIHCI

SEQ ID NO: 2501 - protein, 14 aa, Artificial Sequence
  Description of Artificial Sequence: Synthetic peptide
NSCGPDGDESVDCL

SEQ ID NO: 2502 - protein, 14 aa, Artificial Sequence
  Description of Artificial Sequence: Synthetic peptide
DLCGPELDESTLCI

SEQ ID NO: 2503 - protein, 14 aa, Artificial Sequence
  Description of Artificial Sequence: Synthetic peptide
FDCGPESDESFNCY

SEQ ID NO: 2504 - protein, 14 aa, Artificial Sequence
  Description of Artificial Sequence: Synthetic peptide
DLCGPEFEEDDICY

SEQ ID NO: 2505 - protein, 14 aa, Artificial Sequence
  Description of Artificial Sequence: Synthetic peptide
HACGPEFEEDTYCF

SEQ ID NO: 2506 - protein, 14 aa, Artificial Sequence
  Description of Artificial Sequence: Synthetic peptide
SDCGPELDESVACI

SEQ ID NO: 2507 - protein, 14 aa, Artificial Sequence
  Description of Artificial Sequence: Synthetic peptide
IVCGPELPEDYNCY

SEQ ID NO: 2508 - protein, 14 aa, Artificial Sequence
  Description of Artificial Sequence: Synthetic peptide
DLCGPEFDESFICF

SEQ ID NO: 2509 - protein, 14 aa, Artificial Sequence
  Description of Artificial Sequence: Synthetic peptide
YDCGPEFDETLTCN

SEQ ID NO: 2510 - protein, 14 aa, Artificial Sequence
  Description of Artificial Sequence: Synthetic peptide
YDCGPEVEEIVNCD

SEQ ID NO: 2511 - protein, 14 aa, Artificial Sequence
  Description of Artificial Sequence: Synthetic peptide
VFCGPEIEDDHVCI

SEQ ID NO: 2512 - protein, 14 aa, Artificial Sequence
  Description of Artificial Sequence: Synthetic peptide
FICGPEWEDDYACS

SEQ ID NO: 2513 - protein, 14 aa, Artificial Sequence
  Description of Artificial Sequence: Synthetic peptide
NFCGPEFDESVGCN

SEQ ID NO: 2514 - protein, 14 aa, Artificial Sequence
  Description of Artificial Sequence: Synthetic peptide
NLCGPEVEEILICD

SEQ ID NO: 2515 - protein, 14 aa, Artificial Sequence
  Description of Artificial Sequence: Synthetic peptide
DSCGPEVEEYDLCN

SEQ ID NO: 2516 - protein, 14 aa, Artificial Sequence
  Description of Artificial Sequence: Synthetic peptide
TLCGPEFEEITDCN

SEQ ID NO: 2517 - protein, 14 aa, Artificial Sequence
  Description of Artificial Sequence: Synthetic peptide
TVCGPKMEMNSTCD

SEQ ID NO: 2518 - protein, 14 aa, Artificial Sequence
  Description of Artificial Sequence: Synthetic peptide
VHCWPDWEDAVSCN

SEQ ID NO: 2519 - protein, 14 aa, Artificial Sequence
  Description of Artificial Sequence: Synthetic peptide
DLCGPDGNELDFCF

SEQ ID NO: 2520 - protein, 14 aa, Artificial Sequence
  Description of Artificial Sequence: Synthetic peptide
DLCGPDGEEHYYCD

SEQ ID NO: 2521 - protein, 14 aa, Artificial Sequence
  Description of Artificial Sequence: Synthetic peptide
FNCGPEVEEILLCT

SEQ ID NO: 2522 - protein, 14 aa, Artificial Sequence
  Description of Artificial Sequence: Synthetic peptide
HYCGPEVENINDCI

SEQ ID NO: 2523 - protein, 14 aa, Artificial Sequence
  Description of Artificial Sequence: Synthetic peptide
IDCGPELDESVICD

SEQ ID NO: 2524 - protein, 14 aa, Artificial Sequence
  Description of Artificial Sequence: Synthetic peptide
IFCGPEIEQPALCY

SEQ ID NO: 2525 - protein, 14 aa, Artificial Sequence
  Description of Artificial Sequence: Synthetic peptide
YDCGPEFQEDLVCP

SEQ ID NO: 2526 - protein, 14 aa, Artificial Sequence
  Description of Artificial Sequence: Synthetic peptide
HACWPDWEEPNYCD

SEQ ID NO: 2527 - protein, 14 aa, Artificial Sequence
  Description of Artificial Sequence: Synthetic peptide
NVCWPDWEEDYNCY

SEQ ID NO: 2528 - protein, 14 aa, Artificial Sequence
  Description of Artificial Sequence: Synthetic peptide
SFCGQELGDNYDCI

SEQ ID NO: 2529 - protein, 14 aa, Artificial Sequence
  Description of Artificial Sequence: Synthetic peptide
DDCGPELDETTVCY

SEQ ID NO: 2530 - protein, 14 aa, Artificial Sequence
  Description of Artificial Sequence: Synthetic peptide
NFCGPEWEVATLCL

SEQ ID NO: 2531 - protein, 14 aa, Artificial Sequence
  Description of Artificial Sequence: Synthetic peptide
DLCGPEVEEDTYCN

SEQ ID NO: 2532 - protein, 14 aa, Artificial Sequence
  Description of Artificial Sequence: Synthetic peptide
ALCGPEVEQVDLCT

SEQ ID NO: 2533 - protein, 14 aa, Artificial Sequence
  Description of Artificial Sequence: Synthetic peptide
DDCGPELDESVNCN

SEQ ID NO: 2534 - protein, 14 aa, Artificial Sequence
  Description of Artificial Sequence: Synthetic peptide
IFCGPEFEQIIYCD

SEQ ID NO: 2535 - protein, 14 aa, Artificial Sequence
  Description of Artificial Sequence: Synthetic peptide
SDCWPDWEEVYYCS

SEQ ID NO: 2536 - protein, 14 aa, Artificial Sequence
  Description of Artificial Sequence: Synthetic peptide
FFCGPDGDEVAICD

SEQ ID NO: 2537 - protein, 14 aa, Artificial Sequence
  Description of Artificial Sequence: Synthetic peptide
DDCWPDWEDDVYCY

SEQ ID NO: 2538 - protein, 14 aa, Artificial Sequence
  Description of Artificial Sequence: Synthetic peptide
YDCGPEFDETVVCP

SEQ ID NO: 2539 - protein, 14 aa, Artificial Sequence
  Description of Artificial Sequence: Synthetic peptide
SYCGPELDESVNCV

SEQ ID NO: 2540 - protein, 14 aa, Artificial Sequence
  Description of Artificial Sequence: Synthetic peptide
AFCVSFQQSLPHCD

SEQ ID NO: 2541 - protein, 14 aa, Artificial Sequence
  Description of Artificial Sequence: Synthetic peptide
VNCGPEVEEYFVCF

SEQ ID NO: 2542 - protein, 14 aa, Artificial Sequence
  Description of Artificial Sequence: Synthetic peptide
TNCWPDWEEDFACV

SEQ ID NO: 2543 - protein, 14 aa, Artificial Sequence
  Description of Artificial Sequence: Synthetic peptide
DDCGPEFEEIILCF

SEQ ID NO: 2544 - protein, 14 aa, Artificial Sequence
  Description of Artificial Sequence: Synthetic peptide
NSCGPELEDYHLCP

SEQ ID NO: 2545 - protein, 14 aa, Artificial Sequence
  Description of Artificial Sequence: Synthetic peptide
IHCGPDSDGFDFCD

SEQ ID NO: 2546 - protein, 14 aa, Artificial Sequence
  Description of Artificial Sequence: Synthetic peptide
FDCGPELEEDHLCF

SEQ ID NO: 2547 - protein, 14 aa, Artificial Sequence
  Description of Artificial Sequence: Synthetic peptide
TVCWPDFEEYADCD

SEQ ID NO: 2548 - protein, 14 aa, Artificial Sequence
  Description of Artificial Sequence: Synthetic peptide
YFCWPDWEEAADCL

SEQ ID NO: 2549 - protein, 14 aa, Artificial Sequence
  Description of Artificial Sequence: Synthetic peptide
VSCGPEFDESVDCI

SEQ ID NO: 2550 - protein, 14 aa, Artificial Sequence
  Description of Artificial Sequence: Synthetic peptide
AVCGPELPEDIVCY

SEQ ID NO: 2551 - protein, 14 aa, Artificial Sequence
  Description of Artificial Sequence: Synthetic peptide
VLCGPEVEEYHLCA

SEQ ID NO: 2552 - protein, 14 aa, Artificial Sequence
  Description of Artificial Sequence: Synthetic peptide
SLCWPDWEEVDNCF

SEQ ID NO: 2553 - protein, 14 aa, Artificial Sequence
  Description of Artificial Sequence: Synthetic peptide
TICGPDGQEDYNCH

SEQ ID NO: 2554 - protein, 14 aa, Artificial Sequence
  Description of Artificial Sequence: Synthetic peptide
FLCGPEGEPTYLCT

SEQ ID NO: 2555 - protein, 14 aa, Artificial Sequence
  Description of Artificial Sequence: Synthetic peptide
DDCWLEQHDIYVCA

SEQ ID NO: 2556 - protein, 14 aa, Artificial Sequence
  Description of Artificial Sequence: Synthetic peptide
IFCGPEVEEVAFCF

SEQ ID NO: 2557 - protein, 14 aa, Artificial Sequence
  Description of Artificial Sequence: Synthetic peptide
ALCGPEVEDDYDCL

SEQ ID NO: 2558 - protein, 14 aa, Artificial Sequence
  Description of Artificial Sequence: Synthetic peptide
DDCGPEIELYLTCA

SEQ ID NO: 2559 - protein, 14 aa, Artificial Sequence
  Description of Artificial Sequence: Synthetic peptide
TDCWPDWEDDSICD

SEQ ID NO: 2560 - protein, 14 aa, Artificial Sequence
  Description of Artificial Sequence: Synthetic peptide
SICGPELEEIFLCN

SEQ ID NO: 2561 - protein, 14 aa, Artificial Sequence
  Description of Artificial Sequence: Synthetic peptide
NDCGPELEEDILCF

SEQ ID NO: 2562 - protein, 14 aa, Artificial Sequence
  Description of Artificial Sequence: Synthetic peptide
DDCGPELDETYSCY

SEQ ID NO: 2563 - protein, 14 aa, Artificial Sequence
  Description of Artificial Sequence: Synthetic peptide
FVCGPEWEEIDLCI

SEQ ID NO: 2564 - protein, 14 aa, Artificial Sequence
  Description of Artificial Sequence: Synthetic peptide
YDCGPELDESLSCP

SEQ ID NO: 2565 - protein, 14 aa, Artificial Sequence
  Description of Artificial Sequence: Synthetic peptide
NLCGPELDESIICP

SEQ ID NO: 2566 - protein, 14 aa, Artificial Sequence
  Description of Artificial Sequence: Synthetic peptide
IDCWPDWEEFNNCF

SEQ ID NO: 2567 - protein, 14 aa, Artificial Sequence
  Description of Artificial Sequence: Synthetic peptide
AYCGPELEEHDYCY

SEQ ID NO: 2568 - protein, 14 aa, Artificial Sequence
  Description of Artificial Sequence: Synthetic peptide
DDCSPQFDQIDLCD

SEQ ID NO: 2569 - protein, 14 aa, Artificial Sequence
  Description of Artificial Sequence: Synthetic peptide
SYCGPESDESIYCY

SEQ ID NO: 2570 - protein, 14 aa, Artificial Sequence
  Description of Artificial Sequence: Synthetic peptide
SLCGPEFQEDAPCN

SEQ ID NO: 2571 - protein, 14 aa, Artificial Sequence
  Description of Artificial Sequence: Synthetic peptide
DACGPELDETTHCD

SEQ ID NO: 2572 - protein, 14 aa, Artificial Sequence
  Description of Artificial Sequence: Synthetic peptide
NDCGPEVEEVADCF

SEQ ID NO: 2573 - protein, 14 aa, Artificial Sequence
  Description of Artificial Sequence: Synthetic peptide
YICGPEFEQDYFCF

SEQ ID NO: 2574 - protein, 14 aa, Artificial Sequence
  Description of Artificial Sequence: Synthetic peptide
TDCGPDGDETNYCF

SEQ ID NO: 2575 - protein, 14 aa, Artificial Sequence
  Description of Artificial Sequence: Synthetic peptide
YDCGPEVDESVLCP

SEQ ID NO: 2576 - protein, 14 aa, Artificial Sequence
  Description of Artificial Sequence: Synthetic peptide
IDCGPEFDESAYCT

SEQ ID NO: 2577 - protein, 14 aa, Artificial Sequence
  Description of Artificial Sequence: Synthetic peptide
FDCGPEFEEFFHCY

SEQ ID NO: 2578 - protein, 14 aa, Artificial Sequence
  Description of Artificial Sequence: Synthetic peptide
FPCGPEIEEYDYCV

SEQ ID NO: 2579 - protein, 14 aa, Artificial Sequence
  Description of Artificial Sequence: Synthetic peptide
ADCGPIFESIDICV

SEQ ID NO: 2580 - protein, 14 aa, Artificial Sequence
  Description of Artificial Sequence: Synthetic peptide
ISCGPDLWPTDICT

SEQ ID NO: 2581 - protein, 14 aa, Artificial Sequence
  Description of Artificial Sequence: Synthetic peptide
DDCGPDGDEVHTCN

SEQ ID NO: 2582 - protein, 14 aa, Artificial Sequence
  Description of Artificial Sequence: Synthetic peptide
IDCWPDWEGSFACN

SEQ ID NO: 2583 - protein, 14 aa, Artificial Sequence
  Description of Artificial Sequence: Synthetic peptide
LNCGPDGDETFYCD

SEQ ID NO: 2584 - protein, 14 aa, Artificial Sequence
  Description of Artificial Sequence: Synthetic peptide
IHCGPELGAYISCS

SEQ ID NO: 2585 - protein, 14 aa, Artificial Sequence
  Description of Artificial Sequence: Synthetic peptide
TICWPDWEEDYFCY

SEQ ID NO: 2586 - protein, 14 aa, Artificial Sequence
  Description of Artificial Sequence: Synthetic peptide
HSCLAQFDQDLVCI

SEQ ID NO: 2587 - protein, 14 aa, Artificial Sequence
  Description of Artificial Sequence: Synthetic peptide
NNCASDLSEDNSCI

SEQ ID NO: 2588 - protein, 14 aa, Artificial Sequence
  Description of Artificial Sequence: Synthetic peptide
VNCWPDWEEDVACN

SEQ ID NO: 2589 - protein, 14 aa, Artificial Sequence
  Description of Artificial Sequence: Synthetic peptide
VYCGPELDESFYCF

SEQ ID NO: 2590 - protein, 14 aa, Artificial Sequence
  Description of Artificial Sequence: Synthetic peptide
LFCGTVLDEFFDCD

SEQ ID NO: 2591 - protein, 14 aa, Artificial Sequence
  Description of Artificial Sequence: Synthetic peptide
FDCGPELDESVSCA

SEQ ID NO: 2592 - protein, 14 aa, Artificial Sequence
  Description of Artificial Sequence: Synthetic peptide
YYCGPEVEENVYCI

SEQ ID NO: 2593 - protein, 14 aa, Artificial Sequence
  Description of Artificial Sequence: Synthetic peptide
DYCGPELDDSTICH

SEQ ID NO: 2594 - protein, 14 aa, Artificial Sequence
  Description of Artificial Sequence: Synthetic peptide
VFCGPQWAEANACF

SEQ ID NO: 2595 - protein, 14 aa, Artificial Sequence
  Description of Artificial Sequence: Synthetic peptide
FTCGPEYDESITCP

SEQ ID NO: 2596 - protein, 14 aa, Artificial Sequence
  Description of Artificial Sequence: Synthetic peptide
LNCGPVNDESSVCI

SEQ ID NO: 2597 - protein, 14 aa, Artificial Sequence
  Description of Artificial Sequence: Synthetic peptide
AICWPDWEEFSDCH

SEQ ID NO: 2598 - protein, 14 aa, Artificial Sequence
  Description of Artificial Sequence: Synthetic peptide
YYCGVDLGANVYCY

SEQ ID NO: 2599 - protein, 14 aa, Artificial Sequence
  Description of Artificial Sequence: Synthetic peptide
HYCGPEVEEDYHCD

SEQ ID NO: 2600 - protein, 14 aa, Artificial Sequence
  Description of Artificial Sequence: Synthetic peptide
NDCGSLQYDIPTCV

SEQ ID NO: 2601 - protein, 14 aa, Artificial Sequence
  Description of Artificial Sequence: Synthetic peptide
YVCRPQLDVYHYCN

SEQ ID NO: 2602 - protein, 14 aa, Artificial Sequence
  Description of Artificial Sequence: Synthetic peptide
HDCGPDGDESIICS

SEQ ID NO: 2603 - protein, 14 aa, Artificial Sequence
  Description of Artificial Sequence: Synthetic peptide
FDCGPELDETIICP

SEQ ID NO: 2604 - protein, 14 aa, Artificial Sequence
  Description of Artificial Sequence: Synthetic peptide
VDCGSDRGENAACH

SEQ ID NO: 2605 - protein, 14 aa, Artificial Sequence
  Description of Artificial Sequence: Synthetic peptide
NICLAQFNEDPTCN

SEQ ID NO: 2606 - protein, 14 aa, Artificial Sequence
  Description of Artificial Sequence: Synthetic peptide
TNCGSKSQVSDHCI

SEQ ID NO: 2607 - protein, 14 aa, Artificial Sequence
  Description of Artificial Sequence: Synthetic peptide
NHCHPQFWELTNCN

SEQ ID NO: 2608 - protein, 14 aa, Artificial Sequence
  Description of Artificial Sequence: Synthetic peptide
LLCHPQGDLYHLCH

SEQ ID NO: 2609 - protein, 14 aa, Artificial Sequence
  Description of Artificial Sequence: Synthetic peptide
TNCDSKLEGDDNCF

SEQ ID NO: 2610 - protein, 14 aa, Artificial Sequence
  Description of Artificial Sequence: Synthetic peptide
NDCGPEMDESLLCD

SEQ ID NO: 2611 - protein, 14 aa, Artificial Sequence
  Description of Artificial Sequence: Synthetic peptide
FHCGPEVDESINCN

SEQ ID NO: 2612 - protein, 14 aa, Artificial Sequence
  Description of Artificial Sequence: Synthetic peptide
DFCGPDGDETYVCS

SEQ ID NO: 2613 - protein, 14 aa, Artificial Sequence
  Description of Artificial Sequence: Synthetic peptide
VSCGPQFDENNTCN

SEQ ID NO: 2614 - protein, 14 aa, Artificial Sequence
  Description of Artificial Sequence: Synthetic peptide
VYCHLESEQFDICI

SEQ ID NO: 2615 - protein, 14 aa, Artificial Sequence
  Description of Artificial Sequence: Synthetic peptide
DDCGPEWEFVFFCD

SEQ ID NO: 2616 - protein, 14 aa, Artificial Sequence
  Description of Artificial Sequence: Synthetic peptide
YNCEQQQDEDPSCI

SEQ ID NO: 2617 - protein, 14 aa, Artificial Sequence
  Description of Artificial Sequence: Synthetic peptide
NTCGTEQHEFNGCL

SEQ ID NO: 2618 - protein, 14 aa, Artificial Sequence
  Description of Artificial Sequence: Synthetic peptide
HPCQPGFEEVDYCV

SEQ ID NO: 2619 - protein, 14 aa, Artificial Sequence
  Description of Artificial Sequence: Synthetic peptide
VACSRQLGEDAYCN

SEQ ID NO: 2620 - protein, 14 aa, Artificial Sequence
  Description of Artificial Sequence: Synthetic peptide
DICGAQEVHVYTCP

SEQ ID NO: 2621 - protein, 14 aa, Artificial Sequence
  Description of Artificial Sequence: Synthetic peptide
FFCEGNLDAYLLCL

SEQ ID NO: 2622 - protein, 14 aa, Artificial Sequence
  Description of Artificial Sequence: Synthetic peptide
YYCGPDGEENIVCD

What is claimed is:

1. An isolated polypeptide or polypeptide complex according to Formula I:
A₂-A₁-L₁-P₁-H₁ (Formula I)
wherein:
A₁ comprises a first antigen recognizing molecule that binds to an effector cell antigen;
P₁ comprises a peptide that binds to A₁;
L₁ comprises a linking moiety that connects A₁ to P₁ and is a substrate for a tumor specific protease;
H₁ comprises a half-life extending molecule; and
A₂ comprises a second antigen recognizing molecule that binds to tumor-associated calcium signal transducer 2 (TROP2).

2. The isolated polypeptide or polypeptide complex of claim 1, wherein the first antigen recognizing molecule comprises an antibody or antibody fragment.

3. The isolated polypeptide or polypeptide complex of claim 1, wherein the first antigen recognizing molecule comprises an antibody or antibody fragment that is human or humanized.

4. The isolated polypeptide or polypeptide complex of claim 1, wherein L₁ is bound to N-terminus of the first antigen recognizing molecule.

5. The isolated polypeptide or polypeptide complex of claim 1, wherein A₂ is bound to C-terminus of the first antigen recognizing molecule.

6. The isolated polypeptide or polypeptide complex of claim 1, wherein L₁ is bound to C-terminus of the first antigen recognizing molecule.

7. The isolated polypeptide or polypeptide complex of claim 1, wherein A₂ is bound to N-terminus of the first antigen recognizing molecule.

8. The isolated polypeptide or polypeptide complex of claim 2, wherein the antibody or antibody fragment comprises a single chain variable fragment, a single domain antibody, or a Fab fragment.

9. The isolated polypeptide or polypeptide complex of claim 8, wherein A₁ is the single chain variable fragment (scFv).

10. The isolated polypeptide or polypeptide complex of claim 9, wherein the scFv comprises a scFv heavy chain polypeptide and a scFv light chain polypeptide.

11. The isolated polypeptide or polypeptide complex of claim 8, wherein A₁ is the single domain antibody.

12. The isolated polypeptide or polypeptide complex of claim 2, wherein the antibody or antibody fragment comprises a single chain variable fragment (scFv), a heavy chain variable domain (VH domain), a light chain variable domain (VL domain), or a variable domain (VHH) of a camelid derived single domain antibody.

13. The isolated polypeptide or polypeptide complex of claim 1, wherein A₁ comprises an anti-CD3e single chain variable fragment.

14. The isolated polypeptide or polypeptide complex of claim 1, wherein A₁ comprises an anti-CD3e single chain variable fragment that has a K_{D} binding of 1 μM or less to CD3 on CD3 expressing cells.

15. The isolated polypeptide or polypeptide complex of claim 1, wherein the effector cell antigen comprises CD3.

16. The isolated polypeptide or polypeptide complex of claim 1, wherein A₁ comprises a variable light chain and variable heavy chain each of which is capable of specifically binding to human CD3.

17. The isolated polypeptide or polypeptide complex of claim 1, wherein A₁ comprises complementary determining regions (CDRs) selected from the group consisting of muromonab-CD3 (OKT3), otelixizumab (TRX4), teplizumab (MGA031), visilizumab (Nuvion), SP34, X35, VIT3, BMA030 (BW264/56), CLB-T3/3, CRIS7, YTH12.5, F111-409, CLB-T3.4.2, TR-66, WT32, SPv-T3b, 11D8, XIII-141, XIII-46, XIII-87, 12F6, T3/RW2-8C8, T3/RW2-4B6, OKT3D, M-T301, SMC2, F101.01, UCHT-1, WT-31, 15865, 15865v12, 15865v16, and 15865v19.

18. The isolated polypeptide or polypeptide complex of claim 1, wherein the isolated polypeptide or polypeptide complex of Formula I binds to an effector cell when L₁ is cleaved by the tumor specific protease.

19. The isolated polypeptide or polypeptide complex of claim 1, wherein the isolated polypeptide or polypeptide complex of Formula I binds to an effector cell when L₁ is cleaved by the tumor specific protease and A₁ binds to the effector cell.

20. The isolated polypeptide or polypeptide complex of claim 18, wherein the effector cell is a T cell.

21. The isolated polypeptide or polypeptide complex of claim 18, wherein A₁ binds to a polypeptide that is part of a TCR-CD3 complex on the effector cell.

22. The isolated polypeptide or polypeptide complex of claim 21, wherein the polypeptide that is part of the TCR-CD3 complex is human CD3ε.

23. The isolated polypeptide or polypeptide complex of claim 9, wherein the effector cell antigen comprises CD3, wherein the scFv comprises complementarity determining regions (CDRs): HC-CDR1, HC-CDR2, and HC-CDR3, wherein the HC-CDR1, the HC-CDR2, and the HC-CDR3 of the scFv comprise: HC-CDR1: SEQ ID NO: 1, HC-CDR2: SEQ ID NO: 2, and HC-CDR3: SEQ ID NO: 3; and the scFv comprises CDRs: LC-CDR1, LC-CDR2, and LC-CDR3, wherein the LC-CDR1, the LC-CDR2, and the LC-CDR3 of the scFv comprise LC-CDR1: SEQ ID NO: 4, LC-CDR2: SEQ ID NO:5, and LC-CDR3: SEQ ID NO: 6.

24. The isolated polypeptide or polypeptide complex of claim 1, wherein the effector cell antigen comprises CD3, wherein A₁ comprises complementarity determining regions (CDRs): HC-CDR1, HC-CDR2, and HC-CDR3, wherein the HC-CDR1, the HC-CDR2, and the HC-CDR3 of A₁ comprise: HC-CDR1: SEQ ID NO: 1, HC-CDR2: SEQ ID NO: 2, and HC-CDR3: SEQ ID NO: 3; and A₁ comprises CDRs: LC-CDR1, LC-CDR2, and LC-CDR3, wherein the LC-CDR1, the LC-CDR2, and the LC-CDR3 of A₁ comprise LC-CDR1: SEQ ID NO: 4, LC-CDR2: SEQ ID NO:5, and LC-CDR3: SEQ ID NO: 6.

25. The isolated polypeptide or polypeptide complex of claim 9, wherein the effector cell antigen comprises CD3, and the scFv comprises an amino acid sequence according to SEQ ID NO: 13.

26. The isolated polypeptide or polypeptide complex of claim 9, wherein the effector cell antigen comprises CD3, wherein the scFv comprises complementarity determining regions (CDRs): HC-CDR1, HC-CDR2, and HC-CDR3, wherein the HC-CDR1, the HC-CDR2, and the HC-CDR3 of the scFv comprise: HC-CDR1: SEQ ID NO: 7, HC-CDR2: SEQ ID NO: 8, and HC-CDR3: SEQ ID NO: 9; and the scFv comprises CDRs: LC-CDR1, LC-CDR2, and LC-CDR3, wherein the LC-CDR1, the LC-CDR2, and the LC-CDR3 of the scFv comprise LC-CDR1: SEQ ID NO: 10, LC-CDR2: SEQ ID NO: 11, and LC-CDR3: SEQ ID NO: 12.

27. The isolated polypeptide or polypeptide complex of claim 1, wherein the effector cell antigen comprises CD3, wherein A₁ comprises complementarity determining regions (CDRs): HC-CDR1, HC-CDR2, and HC-CDR3, wherein the HC-CDR1, the HC-CDR2, and the HC-CDR3 of A₁ comprise: HC-CDR1: SEQ ID NO: 7, HC-CDR2: SEQ ID NO: 8, and HC-CDR3: SEQ ID NO: 9; and A₁ comprises CDRs: LC-CDR1, LC-CDR2, and LC-CDR3, wherein the LC-CDR1, the LC-CDR2, and the LC-CDR3 of A₁ comprise LC-CDR1: SEQ ID NO: 10, LC-CDR2: SEQ ID NO: 11, and LC-CDR3: SEQ ID NO: 12.

28. The isolated polypeptide or polypeptide complex of claim 9, wherein the effector cell antigen comprises CD3, and the scFv comprises an amino acid sequence according to SEQ ID NO: 14.

29. The isolated polypeptide or polypeptide complex of claim 10, wherein the second antigen recognizing molecule comprises an antibody or antibody fragment.

30. The isolated polypeptide or polypeptide complex of claim 29, wherein the antibody or antibody fragment thereof comprises a single chain variable fragment, a single domain antibody, or a Fab.

31. The isolated polypeptide or polypeptide complex of claim 30, wherein the antibody or antibody fragment thereof comprises a single chain variable fragment (scFv), a heavy chain variable domain (VH domain), a light chain variable domain (VL domain), a variable domain (VHH) of a camelid derived single domain antibody.

32. The isolated polypeptide or polypeptide complex of claim 31, wherein the antibody or antibody fragment thereof is humanized or human.

33. The isolated polypeptide or polypeptide complex of claim 30, wherein A₂ is the Fab.

34. The isolated polypeptide or polypeptide complex of claim 33, wherein the Fab comprises (a) a Fab light chain polypeptide and (b) a Fab heavy chain polypeptide.

35. The isolated polypeptide or polypeptide complex of claim 33, wherein the Fab comprises complementarity determining regions (CDRs): HC-CDR1, HC-CDR2, and HC-CDR3, wherein the HC-CDR1, the HC-CDR2, and the HC-CDR3 of the Fab comprise: HC-CDR1: SEQ ID NO: 15, HC-CDR2: SEQ ID NO: 16, and HC-CDR3: SEQ ID NO: 17; and the Fab comprises CDRs: LC-CDR1, LC-CDR2, and LC-CDR3, wherein the LC-CDR1, the LC-CDR2, and the LC-CDR3 of the Fab comprise LC-CDR1: SEQ ID NO: 18, LC-CDR2: SEQ ID NO: 19, and LC-CDR3: SEQ ID NO: 20.

36. The isolated polypeptide or polypeptide complex of claim 1, wherein A₂ comprises complementarity determining regions (CDRs): HC-CDR1, HC-CDR2, and HC-CDR3, wherein the HC-CDR1, the HC-CDR2, and the HC-CDR3 of A₂ comprise: HC-CDR1: SEQ ID NO: 15, HC-CDR2: SEQ ID NO: 16, and HC-CDR3: SEQ ID NO: 17; and A₂ comprises CDRs: LC-CDR1, LC-CDR2, and LC-CDR3, wherein the LC-CDR1, the LC-CDR2, and the LC-CDR3 of A₂ comprise LC-CDR1: SEQ ID NO: 18, LC-CDR2: SEQ ID NO: 19, and LC-CDR3: SEQ ID NO: 20.

37. The isolated polypeptide or polypeptide complex of claim 34, wherein the Fab light chain polypeptide comprises an amino acid sequence according to SEQ ID NO: 21.

38. The isolated polypeptide or polypeptide complex of claim 34, wherein Fab heavy chain polypeptide comprises an amino acid sequence according to SEQ ID NO: 22.

39. The isolated polypeptide or polypeptide complex of claim 34, wherein the Fab light chain polypeptide of A₂ is bound to a C-terminus of the single chain variable fragment (scFv) of A₁.

40. The isolated polypeptide or polypeptide complex of claim 34, wherein the Fab heavy chain polypeptide of A₂ is bound to a C-terminus of the single chain variable fragment (scFv) A₁.

41. The isolated polypeptide or polypeptide complex of claim 34, wherein the Fab light chain polypeptide of A₂ is bound to a N-terminus of the single chain variable fragment (scFv) of A₁.

42. The isolated polypeptide or polypeptide complex of claim 34, wherein the Fab heavy chain polypeptide of A₂ is bound to a N-terminus of the single chain variable fragment (scFv) A₁.

43. The isolated polypeptide or polypeptide complex of claim 34, wherein the Fab heavy chain polypeptide of A₂ is bound to the scFv heavy chain polypeptide of A₁.

44. The isolated polypeptide or polypeptide complex of claim 34, wherein the Fab light chain polypeptide of A₂ is bound to the scFv heavy chain polypeptide of A₁.

45. The isolated polypeptide or polypeptide complex of claim 34, wherein the Fab heavy chain polypeptide of A₂ is bound to the scFv light chain polypeptide of A₁.

46. The isolated polypeptide or polypeptide complex of claim 34, wherein the Fab light chain polypeptide of A₂ is bound to the scFv light chain polypeptide of A₁.

47. The isolated polypeptide or polypeptide complex of claim 34, wherein A₂ further comprises P₂ and L₂, wherein P₂ comprises a peptide that binds to A₂; and L₂ comprises a linking moiety that connects A₂ to P₂ and is a substrate for a tumor specific protease.

48. The isolated polypeptide or polypeptide complex of claim 47, wherein the isolated polypeptide or polypeptide complex is according to Formula Ia
P₂-L₂-A₂-A₁-L₁-P₁-H₁ (Formula Ia).

49. The isolated polypeptide or polypeptide complex of claim 48, wherein the Fab heavy chain polypeptide of A₂ is bound to the scFv heavy chain polypeptide of A₁ and L₂ is bound to the Fab light chain polypeptide of A₂.

50. The isolated polypeptide or polypeptide complex of claim 48, wherein the Fab light chain polypeptide of A₂ is bound to the scFv heavy chain polypeptide of A₁ and L₂ is bound to the Fab heavy chain polypeptide of A₂.

51. The isolated polypeptide or polypeptide complex of claim 48, wherein the Fab heavy chain polypeptide of A₂ is bound to the scFv light chain polypeptide of A₁ and L₂ is bound to the Fab light chain polypeptide of A₂.

52. The isolated polypeptide or polypeptide complex of claim 48, wherein the Fab light chain polypeptide of A₂ is bound to the scFv light chain polypeptide of A₁ and L₂ is bound to the Fab heavy chain polypeptide of A₂.

53. The isolated polypeptide or polypeptide complex of claim 1, wherein P₁ impairs binding of A₁ to the effector cell antigen.

54. The isolated polypeptide or polypeptide complex of claim 1, wherein P₁ is bound to A₁ through ionic interactions, electrostatic interactions, hydrophobic interactions, Pi-stacking interactions, and H-bonding interactions, or a combination thereof.

55. The isolated polypeptide or polypeptide complex of claim 1, wherein P₁ has less than 70% sequence homology to the effector cell antigen.

56. The isolated polypeptide or polypeptide complex of claim 48, wherein P₂ impairs binding of A₂ to TROP2.

57. The isolated polypeptide or polypeptide complex of claim 48, wherein P₂ is bound to A₂ through ionic interactions, electrostatic interactions, hydrophobic interactions, Pi-stacking interactions, and H-bonding interactions, or a combination thereof.

58. The isolated polypeptide or polypeptide complex of claim 48, wherein P₂ is bound to A₂ at or near an antigen binding site.

59. The isolated polypeptide or polypeptide complex of claim 48, wherein P₂ has less than 70% sequence homology to TROP2.

60. The isolated polypeptide or polypeptide complex of claim 48, wherein P₁ or P₂ comprises a peptide sequence of at least 10 amino acids in length.

61. The isolated polypeptide or polypeptide complex of claim 48, wherein P₁ or P₂ comprises a peptide sequence of at least 10 amino acids in length and no more than 20 amino acids in length.

62. The isolated polypeptide or polypeptide complex of claim 48, wherein P₁ or P₂ comprises a peptide sequence of at least 16 amino acids in length.

63. The isolated polypeptide or polypeptide complex of claim 48, wherein P₁ or P₂ comprises a peptide sequence of no more than 40 amino acids in length.

64. The isolated polypeptide or polypeptide complex of claim 48, wherein P₁ or P₂ comprises at least two cysteine amino acid residues.

65. The isolated polypeptide or polypeptide complex of claim 48, wherein P₁ or P₂ comprises a cyclic peptide or a linear peptide.

66. The isolated polypeptide or polypeptide complex of claim 48, wherein P₁ or P₂ comprises a cyclic peptide.

67. The isolated polypeptide or polypeptide complex of claim 48, wherein P₁ or P₂ comprises a linear peptide.

68. The isolated polypeptide or polypeptide complex of claim 1, wherein P₁ comprises at least two cysteine amino acid residues.

69. The isolated polypeptide or polypeptide complex of claim 1, wherein P₁ comprises an amino acid sequence according to SEQ ID NO: 26, 27, or 122.

70. The isolated polypeptide or polypeptide complex of claim 48, wherein P₂ comprises an amino acid sequence according to any one of SEQ ID NOs: 23-25.

71. The isolated polypeptide or polypeptide complex of claim 48, wherein P₂ comprises an amino acid sequence according to X₁-X₂-X₃-X₄-C-X₆-X₇-X₈-X₉-X₁₀-C-X₁₂-X₁₃-X₁₄ and
X₁ is selected from N, D, S, Y, A, F, H, T, L, and V;
X₂ is selected from S, T, D, A, H, V, Y, N, F, I, and L;
X₃ is selected from L, I, and V;
X₄ is selected from F, L, V, M, W, I, Y, and H;
X₆ is selected from V, F, L, I, and W;
X₇ is selected from K, R, Q, N, H, and M;
X₈ is selected from N and K;
X₉ is selected from L, V, and I;
X₁₀ is selected from Y, W, F, Q, and L;
X₁₂ is selected from W and V;
X₁₃ is selected from I, N, H, T, V, Y, and D;
X₁₄ is selected from D, V, A, S, I, T, N, Y, H, and P.

72. The isolated polypeptide or polypeptide complex of claim 71, wherein
X₁ is selected from N, D, S, Y, A, F, and T;
X₂ is selected from S, T, D, A, H, V, Y, and N;
X₃ is L;
X₄ is selected from F, L, V, M, and W;
X₆ is selected from V, F, and L;
X₇ is selected from K, R, Q, and N;
X₈ is selected from N and K;
X₉ is selected from L, V, and I;
X₁₀ is selected from Y, W, and F;
X₁₂ is W;
X₁₃ is selected from I, N, H, and T;
X₁₄ is selected from D, V, A, S, I, T, and N.

73. The isolated polypeptide or polypeptide complex of claim 72, wherein
X₁ is selected from N, D, S, and Y;
X₂ is selected from S, T, and D;
X₃ is L;
X₄ is selected from F, L, and V;
X₆ is selected from V and F;
X₇ is selected from K, R, and Q;
X₈ is N;
X₉ is selected from L and V;
X₁₀ is selected from Y and W;
X₁₂ is W;
X₁₃ is selected from I, N, and H;
X₁₄ is selected from D, V, A, and S.

74. The isolated polypeptide or polypeptide complex of claim 48, wherein P₂ comprises an amino acid sequence according to J₁-J₂-J₃-C-J₅-J₆-J₇-J₈-W-J₁₀-J₁₁-C-J₁₃-J₁₄ and
J₁ is selected from V, I, L, P, E, F, and M;
J₂ is selected from D and N;
J₃ is selected from F and W;
J₅ is selected from A, E, S, R, K, Y, L, Q, G, M, F, T, W, and D;
J₆ is selected from L, M, I, V, F, T, R, and S;
J₇ is selected from Y, F, and N;
J₈ is selected from N, R, D, H, K, Q, S, G, A, E, and M;
J₁₀ is selected from P and R;
J₁₁ is selected from V and I;
J₁₃ is selected from D, G, N, R, S, Q, Y, T, A, E, L, V, K, M, I, H, F, and W;
J₁₄ is selected from T, S, Q, L, D, N, A, E, K, M, V, R, I, H, P, V, and W; or
P₂ comprises an amino acid sequence according to B₁-B₂-B₃-C-B₅-B₆-B₇-B₈-W-B₁₀-B₁₁-C-B₁₃-B₁₄ and
B₁ is selected from V, I, L, P, E, F, and M;
B₂ is selected from D and N;
B₃ is selected from F and W;
B₅ is selected from A, E, S, R, K, Y, L, Q, G, M, F, T, W, and D;
B₆ is selected from L, M, I, V, F, T, R, and S;
B₇ is selected from Y, F, and N;
B₈ is selected from N, R, D, H, K, Q, S, G, A, E, and M;
B₁₀ is selected from P and R;
B₁₁ is selected from V and I;
B₁₃ is selected from D, G, N, R, S, Q, Y, T, A, E, L, V, K, M, I, H, F, and W;
B₁₄ is selected from T, S, Q, L, D, N, A, E, K, M, V, R, I, H, P, V, G, and W.

75. The isolated polypeptide or polypeptide complex of claim 74, wherein
J₁ is selected from V, I, and L;
J₂ is D;
J₃ is F;
J₅ is selected from A, E, S, R, K, Y, and L;
J₆ is selected from L, M, and I;
J₇ is Y;
J₈ is selected from N, R, D, H, K, Q, S, and G;
J₁₀ is P;
J₁₁ is selected from V and I;
J₁₃ is selected from D, G, N, R, S, Q, Y, T, and A;
J₁₄ is selected from T, S, Q, L, D, N, A, and E; and
B₁ is selected from V, I, and L;
B₂ is D;
B₃ is F;
B₅ is selected from A, E, S, R, K, Y, M, G, and L;
B₆ is selected from L, M, and I;
B₇ is Y;
B₈ is selected from N, R, D, H, K, Q, S, and G;
B₁₀ is P;
B₁₁ is selected from V and I;
B₁₃ is selected from D, G, N, R, S, Q, Y, T, H, and A;
B₁₄ is selected from T, S, Q, L, D, N, A, G, and E.

76. The isolated polypeptide or polypeptide complex of claim 75, wherein
J₁ is selected from V, I, and L;
J₂ is D;
J₃ is F;
J₅ is selected from A, E, S, and R;
J₆ is selected from L, M, and I;
J₇ is Y;
J₈ is selected from N, R, and D;
J₁₀ is P;
J₁ is selected from V and I;
J₁₃ is selected from D, G, N, R, S, and Q;
J₁₄ is selected from T, S, Q, and L; and
B₁ is selected from V, I, and L;
B₂ is D;
B₃ is F;
B₅ is selected from A, E, S, K, M, G, and R;
B₆ is selected from L, M, and I;
B₇ is Y;
B₈ is selected from N, R, S, H, and D;
B₁₀ is P;
B₁₁ is selected from V and I;
B₁₃ is selected from D, G, N, R, S, H, A, Y, and Q;
B₁₄ is selected from T, S, Q, G, and L.

77. The isolated polypeptide or polypeptide complex of claim 48, wherein P₂ comprises the amino acid sequences according to SEQ ID NOs: 133-145.

78. The isolated polypeptide or polypeptide complex of claim 48, wherein P₂ comprises the amino acid sequences according to SEQ ID NOs: 146-158.

79. The isolated polypeptide or polypeptide complex of claim 48, wherein P₂ comprises an amino acid sequence according to any of the sequences of Table 27.

80. The isolated polypeptide or polypeptide complex of claim 48, wherein P₂ comprises the amino acid sequences according to SEQ ID NOs: 159-178.

81. The isolated polypeptide or polypeptide complex of claim 48, wherein P₂ comprises an amino acid sequence according to any of the sequences of Table 29.

82. The isolated polypeptide or polypeptide complex of claim 48, wherein P₂ comprises the amino acid sequences according to SEQ ID NOs: 179-201.

83. The isolated polypeptide or polypeptide complex of claim 48, wherein P₂ comprises the amino acid sequence according to SEQ ID NO: 24 or a peptide sequence that has 1, 2, or 3, amino acid substitutions, additions, or deletions relative to the amino acid sequence of SEQ ID NO: 24.

84. The isolated polypeptide or polypeptide complex of claim 48, wherein P₂ comprises the amino acid sequence according to SEQ ID NO: 181 or a peptide sequence that has 1, 2, or 3, amino acid substitutions, additions, or deletions relative to the amino acid sequence of SEQ ID NO: 181.

85. The isolated polypeptide or polypeptide complex of claim 48, wherein P₂ comprises the amino acid sequence according to SEQ ID NO: 186 or a peptide sequence that has 1, 2, or 3, amino acid substitutions, additions, or deletions relative to the amino acid sequence of SEQ ID NO: 186.

86. The isolated polypeptide or polypeptide complex of claim 48, wherein P₂ comprises the amino acid sequence according to SEQ ID NO: 24.

87. The isolated polypeptide or polypeptide complex of claim 48, wherein P₂ comprises the amino acid sequence according to SEQ ID NO: 181.

88. The isolated polypeptide or polypeptide complex of claim 48, wherein P₂ comprises the amino acid sequence according to SEQ ID NO: 186.

89. The isolated polypeptide or polypeptide complex of claim 1, wherein P₁ comprises an amino acid sequence according to Z₁-Z₂-C-Z₄-P-Z₆-Z₇-Z₈-Z₉-Z₁₀-Z₁₁-Z₁₂-C-Z₁₄ and
Z₁ is selected from D, Y, F, I, N, V, H, L, A, T, S, and P;
Z₂ is selected from D, Y, L, F, I, N, A, V, H, T, and S;
Z₄ is selected from G and W;
Z₆ is selected from E, D, V, and P;
Z₇ is selected from W, L, F, V, G, M, I, and Y;
Z₈ is selected from E, D, P, and Q;
Z₉ is selected from E, D, Y, V, F, W, P, L, and Q;
Z₁₀ is selected from S, D, Y, T, I, F, V, N, A, P, L, and H;
Z₁₁ is selected from I, Y, F, V, L, T, N, S, D, A, and H;
Z₁₂ is selected from F, D, Y, L, I, V, A, N, T, P, S, and H;
Z₁₄ is selected from D, Y, N, F, I, P, V, A, T, H, L and S; or
P₁ comprises an amino acid sequence according to U₁-U₂-C-U₄-P-U₆-U₇-U₈-U₉-U₁₀-U₁₁-U₁₂-C-U₁₄ and
U₁ is selected from D, Y, F, I, N, V, H, L, A, T, S, and P;
U₂ is selected from D, Y, L, F, I, N, A, V, H, T, and S;
U₄ is selected from G and W;
U₆ is selected from E, D, V, and P;
U₇ is selected from W, L, F, V, G, M, I, and Y;
U₈ is selected from E, D, P, and Q;
U₉ is selected from E, D, Y, V, F, W, P, L, and Q;
U₁₀ is selected from S, D, Y, T, I, F, V, N, A, P, L, and H;
U₁n is selected from I, Y, F, V, L, T, N, S, D, A, and H;
U₁₂ is selected from F, D, Y, L, I, V, A, N, T, P, S, G, and H;
U₁₄ is selected from D, Y, N, F, I, P, V, A, T, H, L, M, and S.

90. The isolated polypeptide or polypeptide complex of claim 89, wherein
Z₁ is selected from D, Y, F, I, and N;
Z₂ is selected from D, Y, L, F, I, and N;
Z₄ is selected from G and W;
Z₆ is selected from E and D;
Z₇ is selected from W, L, F, and V;
Z₈ is selected from E and D;
Z₉ is selected from E, D, Y, and V;
Z₁₀ is selected from S, D, Y, T, and I;
Z₁₁ is selected from I, Y, F, V, L, and T;
Z₁₂ is selected from F, D, Y, L, I, V, A, and N;
Z₁₄ is selected from D, Y, N, F, I, and P; and
U₁ is selected from D, Y, F, I, V, and N;
U₂ is selected from D, Y, L, F, I, and N;
U₄ is selected from G and W;
U₆ is selected from E and D;
U₇ is selected from W, L, F, G, and V;
U₈ is selected from E and D;
U₉ is selected from E, D, Y, and V;
U₁₀ is selected from S, D, Y, T, and I;
U₁₁ is selected from I, Y, F, V, L, and T;
U₁₂ is selected from F, D, Y, L, I, V, A, G, and N;
U₁₄ is selected from D, Y, N, F, I, M, and P.

91. The isolated polypeptide or polypeptide complex of claim 90, wherein
Z₁ is selected from D, Y, and F;
Z₂ is selected from D, Y, L, and F;
Z₄ is selected from G and W;
Z₆ is selected from E and D;
Z₇ is selected from W, L, and F;
Z₈ is selected from E and D;
Z₉ is selected from E and D;
Z₁₀ is selected from S, D, and Y;
Z₁₁ is selected from I, Y, and F;
Z₁₂ is selected from F, D, Y, and L;
Z₁₄ is selected from D, Y, and N; and
U₁ is selected from D, Y, V, and F;
U₂ is selected from D, Y, L, and F;
U₄ is selected from G and W;
U₆ is selected from E and D;
U₇ is selected from W, L, G, and F;
U₈ is selected from E and D;
U₉ is selected from E and D;
U₁₀ is selected from S, D, T, and Y;
Uₙ is selected from I, Y, V, L, and F;
U₁₂ is selected from F, D, Y, G, A, and L;
U₁₄ is selected from D, Y, M, and N.

92. The isolated polypeptide or polypeptide complex of claim 1, wherein P₁ comprises the amino acid sequences according to SEQ ID NOs: 202-228.

93. The isolated polypeptide or polypeptide complex of claim 1, wherein P₁ comprises an amino acid sequences according to any of the sequences of Table 35.

94. The isolated polypeptide or polypeptide complex of claim 1, wherein P₁ comprises the amino acid sequences according to SEQ ID NOs: 229-240.

95. The isolated polypeptide or polypeptide complex of claim 1, wherein P₁ comprises the amino acid sequence according to SEQ ID NO: 239 or a peptide sequence that has 1, 2, or 3, amino acid substitutions, additions, or deletions relative to the amino acid sequence of SEQ ID NO: 239.

96. The isolated polypeptide or polypeptide complex of claim 1, wherein P₁ comprises the amino acid sequence according to SEQ ID NO: 27 or a peptide sequence that has 1, 2, or 3, amino acid substitutions, additions, or deletions relative to the amino acid sequence of SEQ ID NO: 27.

97. The isolated polypeptide or polypeptide complex of claim 1, wherein P₁ comprises the amino acid sequence according to SEQ ID NO: 26 or a peptide sequence that has 1, 2, or 3, amino acid substitutions, additions, or deletions relative to the amino acid sequence of SEQ ID NO: 26.

98. The isolated polypeptide or polypeptide complex of claim 1, wherein P₁ comprises the amino acid sequence according to SEQ ID NO: 239.

99. The isolated polypeptide or polypeptide complex of claim 1, wherein P₁ comprises the amino acid sequence according to SEQ ID NO: 27.

100. The isolated polypeptide or polypeptide complex of claim 1, wherein P₁ comprises the amino acid sequence according to SEQ ID NO: 26.

101. The isolated polypeptide or polypeptide complex of claim 1, wherein L₁ is bound to N-terminus of A₁.

102. The isolated polypeptide or polypeptide complex of claim 1, wherein L₁ is bound to C-terminus of A₁.

103. The isolated polypeptide or polypeptide complex of claim 48, wherein L₂ is bound to N-terminus of A₂.

104. The isolated polypeptide or polypeptide complex of claim 48, wherein L₂ is bound to C-terminus of A₂.

105. The isolated polypeptide or polypeptide complex of claim 48, wherein L₁ or L₂ is a peptide sequence having at least 5 to no more than 50 amino acids.

106. The isolated polypeptide or polypeptide complex of claim 48, wherein L₁ or L₂ is a peptide sequence having at least 10 to no more than 30 amino acids.

107. The isolated polypeptide or polypeptide complex of claim 48, wherein L₁ or L₂ is a peptide sequence having at least 10 amino acids.

108. The isolated polypeptide or polypeptide complex of claim 48, wherein L₁ or L₂ is a peptide sequence having at least 18 amino acids.

109. The isolated polypeptide or polypeptide complex of claim 48, wherein L₁ or L₂ is a peptide sequence having at least 26 amino acids.

110. The isolated polypeptide or polypeptide complex of claim 48, wherein L₁ or L₂ has a formula comprising (G₂S)ₙ (SEQ ID NO: 243), wherein n is an integer from 1 to 3.

111. The isolated polypeptide or polypeptide complex of claim 1, wherein L₁ has a formula selected from the group consisting of (G₂S)ₙ, (GS)ₙ, (GSGGS)ₙ (SEQ ID NO: 62), (GGGS)ₙ (SEQ ID NO: 63), (GGGGS)ₙ (SEQ ID NO: 64), and (GSSGGS)ₙ (SEQ ID NO: 65), wherein n is an integer of at least 1.

112. The isolated polypeptide or polypeptide complex of claim 1, wherein P₁ becomes unbound from A₁ when L₁ is cleaved by the tumor specific protease thereby exposing A₁ to the effector cell antigen.

113. The isolated polypeptide or polypeptide complex of claim 48, wherein P₂ becomes unbound from A₂ when L₂ is cleaved by the tumor specific protease thereby exposing A₂ to TROP2.

114. The isolated polypeptide or polypeptide complex of claim 1, wherein the tumor specific protease is selected from the group consisting of a matrix metalloprotease (MMP), serine protease, cysteine protease, threonine protease, and aspartic protease.

115. The isolated polypeptide or polypeptide complex of claim 114, wherein the matrix metalloprotease comprises MMP2, MMP7, MMP9, MMP13, or MMP14.

116. The isolated polypeptide or polypeptide complex of claim 114, wherein the serine protease comprises matriptase (MTSP1), urokinase, or hepsin.

117. The isolated polypeptide or polypeptide complex of claim 48, wherein L₁ or L₂ comprises a urokinase cleavable amino acid sequence, a matriptase cleavable amino acid sequence, a matrix metalloprotease cleavable amino acid sequence, or a legumain cleavable amino acid sequence.

118. The isolated polypeptide or polypeptide complex of claim 48, wherein L₁ or L₂ comprises an amino acid sequence according to SEQ ID NO: 31 or 32.

119. The isolated polypeptide or polypeptide complex of claim 48, wherein L₁ or L₂ comprises an amino acid sequence according to SEQ ID NO: 58 or 59.

120. The isolated polypeptide or polypeptide complex of claim 48, wherein L₁ or L₂ comprises an amino acid sequence according to any one of SEQ ID NOs: 28-61.

121. The isolated polypeptide or polypeptide complex of claim 48, wherein L₁ or L₂ comprises an amino acid sequence of Linker 25 (ISSGLLSGRSDAG) (SEQ ID NO: 54), Linker 26 (AAGLLAPPGGLSGRSDAG) (SEQ ID NO: 55), Linker 27 (SPLGLSGRSDAG) (SEQ ID NO: 56), or Linker 28 (LSGRSDAGSPLGLAG) (SEQ ID NO: 57), or an amino acid sequence that has 1, 2, or 3 amino acid substitutions, additions, or deletions relative to the amino acid sequence of Linker 25, Linker 26, Linker 27, or Linker 28.

122. The isolated polypeptide or polypeptide complex of claim 1, wherein H₁ comprises a polymer.

123. The isolated polypeptide or polypeptide complex of claim 122, wherein the polymer is polyethylene glycol (PEG).

124. The isolated polypeptide or polypeptide complex of claim 1, wherein H₁ comprises albumin.

125. The isolated polypeptide or polypeptide complex of claim 1, wherein H₁ comprises an Fc domain.

126. The isolated polypeptide or polypeptide complex of claim 124, wherein the albumin is serum albumin.

127. The isolated polypeptide or polypeptide complex of claim 124, wherein the albumin is human serum albumin.

128. The isolated polypeptide or polypeptide complex of claim 1, wherein H₁ comprises a polypeptide, a ligand, or a small molecule.

129. The isolated polypeptide or polypeptide complex of claim 128, wherein the polypeptide, the ligand or the small molecule binds serum protein or a fragment thereof, a circulating immunoglobulin or a fragment thereof, or CD35/CR1.

130. The isolated polypeptide or polypeptide complex of claim 129, wherein the serum protein comprises a thyroxine-binding protein, a transthyretin, a 1-acid glycoprotein, a transferrin, transferrin receptor or a transferrin-binding portion thereof, a fibrinogen, or an albumin.

131. The isolated polypeptide or polypeptide complex of claim 129, wherein the circulating immunoglobulin molecule comprises IgG1, IgG2, IgG3, IgG4, slgA, IgM or IgD.

132. The isolated polypeptide or polypeptide complex of claim 129, wherein the serum protein is albumin.

133. The isolated polypeptide or polypeptide complex of claim 128, wherein the polypeptide is an antibody.

134. The isolated polypeptide or polypeptide complex of claim 133, wherein the antibody comprises a single domain antibody, a single chain variable fragment, or a Fab.

135. The isolated polypeptide or polypeptide complex of claim 134, wherein the single domain antibody comprises a single domain antibody that binds to albumin.

136. The isolated polypeptide or polypeptide complex of claim 134, wherein the single domain antibody is a human or humanized antibody.

137. The isolated polypeptide or polypeptide complex of claim 134, wherein the single domain antibody is 645gH1gL1.

138. The isolated polypeptide or polypeptide complex of claim 134, wherein the single domain antibody is 645dsgH5gL4.

139. The isolated polypeptide or polypeptide complex of claim 134, wherein the single domain antibody is 23-13-A01-sc02.

140. The isolated polypeptide or polypeptide complex of claim 134, wherein the single domain antibody is A10m3 or a fragment thereof.

141. The isolated polypeptide or polypeptide complex of claim 134, wherein the single domain antibody is DOM7r-31.

142. The isolated polypeptide or polypeptide complex of claim 134, wherein the single domain antibody is DOM7h-11-15.

143. The isolated polypeptide or polypeptide complex of claim 134, wherein the single domain antibody is Alb-1, Alb-8, or Alb-23.

144. The isolated polypeptide or polypeptide complex of claim 134, wherein the single domain antibody is 10E.

145. The isolated polypeptide or polypeptide complex of claim 134, wherein the single domain antibody comprises complementarity determining regions (CDRs): HC-CDR1, HC-CDR2, and HC-CDR3, wherein the HC-CDR1, the HC-CDR2, and the HC-CDR3 of the single domain antibody comprise: HC-CDR1: SEQ ID NO: 66, HC-CDR2: SEQ ID NO: 67, and HC-CDR3: SEQ ID NO: 68.

146. The isolated polypeptide or polypeptide complex of claim 134, wherein the single domain antibody comprises an amino acid sequence according to SEQ ID NO: 69.

147. The isolated polypeptide or polypeptide complex of claim 134, wherein the single domain antibody comprises complementarity determining regions (CDRs): HC-CDR1, HC-CDR2, and HC-CDR3, wherein the HC-CDR1, the HC-CDR2, and the HC-CDR3 of the single domain antibody comprise: HC-CDR1: SEQ ID NO: 70, HC-CDR2: SEQ ID NO: 71, and HC-CDR3: SEQ ID NO: 72.

148. The isolated polypeptide or polypeptide complex of claim 134, wherein the single domain antibody comprises an amino acid sequence according to SEQ ID NO: 73.

149. The isolated polypeptide or polypeptide complex of claim 134, wherein the single domain antibody is SA21.

150. The isolated polypeptide or polypeptide complex of claim 1, wherein the isolated polypeptide or polypeptide complex comprises a modified amino acid, a non-natural amino acid, a modified non-natural amino acid, or a combination thereof.

151. The isolated polypeptide or polypeptide complex of claim 150, wherein the modified amino acid or modified non-natural amino acid comprises a post-translational modification.

152. The isolated polypeptide or polypeptide complex of claim 1, wherein H₁ comprises a linking moiety (L₃) that connects H₁ to P₁.

153. The isolated polypeptide or polypeptide complex of claim 152, wherein L₃ is a peptide sequence having at least 5 to no more than 50 amino acids.

154. The isolated polypeptide or polypeptide complex of claim 152, wherein L₃ is a peptide sequence having at least 10 to no more than 30 amino acids.

155. The isolated polypeptide or polypeptide complex of claim 152, wherein L₃ is a peptide sequence having at least 10 amino acids.

156. The isolated polypeptide or polypeptide complex of claim 152, wherein L₃ is a peptide sequence having at least 18 amino acids.

157. The isolated polypeptide or polypeptide complex of claim 152, wherein L₃ is a peptide sequence having at least 26 amino acids.

158. The isolated polypeptide or polypeptide complex of claim 152, wherein L₃ has a formula selected from the group consisting of (G₂S)ₙ, (GS)ₙ, (GSGGS)ₙ (SEQ ID NO: 62), (GGGS)ₙ (SEQ ID NO: 63), (GGGGS)ₙ (SEQ ID NO: 64), and (GSSGGS)ₙ (SEQ ID NO: 65), wherein n is an integer of at least 1.

159. The isolated polypeptide or polypeptide complex of claim 152, wherein L₃ comprises an amino acid sequence according to SEQ ID NO: 30.

160. The isolated polypeptide or polypeptide complex of claim 1, wherein the isolated polypeptide or polypeptide complex comprises an amino acid sequence with at least 95% sequence identity to SEQ ID NOs: 74-132, 241-242.

161. A pharmaceutical composition comprising: (a) the isolated polypeptide or polypeptide complex of claim 1; and (b) a pharmaceutically acceptable excipient.

162. An isolated recombinant nucleic acid molecule encoding the isolated polypeptide or polypeptide complex of claim 1.
